(19) United States
(12) Patent Application Publication
(10) Pub. No.: US 2010/0256040 A1
(43) Pub. Date: Oct. 7, 2010

(54) COMPOSITION AND METHOD FOR TREATING VIRAL INFECTION

(75) Inventors: Scott Morham, Salt Lake City, UT (US); Kenton Zavitz, Salt Lake City, UT (US); Adrian Hobden, Salt Lake City, UT (US)

Correspondence Address: MYRIAD GENETICS INC.;INTELLECTUAL PROPERTY DEPARTMENT, 320 WAKARA WAY, SALT LAKE CITY, UT, 84108, US

(73) Assignee: Myriad Genetics, Incorporated, Salt Lake City, UT (US)

(21) Appl. No.: 11/625,200

(22) Filed: Jan. 19, 2007

Related U.S. Application Data
(63) Continuation of application No. 10/224,999, filed on Aug. 20, 2002, now abandoned.
(60) Provisional application No. 60/313,695, filed on Aug. 20, 2001.

(51) Int. Cl. A61K 38/16; C07K 7/06; C07K 7/08; C07K 14/00; C07K 14/005; C07H 21/04; C12N 5/10; A61K 38/08; A61K 38/10; A61P 31/18

(52) U.S. Cl. 514/1.2; 530/328; 530/327; 530/326; 530/325; 530/324; 536/23.1; 435/325; 536/23.72

(57) ABSTRACT

Methods for inhibiting virus propagation and treating virus infection are provided which include administering to cells infected with viruses a compound capable of inhibiting viral budding from the cells.

### RELATED U.S. APPLICATIONS

[0001] This application is a continuation of U.S. patent application Ser. No. 10/224,999 filed on Aug. 20, 2002; which claims the benefit under 35 U.S.C. §119(e) to U.S. Provisional Application Ser. No. 60/313,695 filed on Aug. 20, 2001, which is incorporated herein by reference in its entirety.

### SEQUENCE LISTING

[0002] The instant application was filed with a formal Sequence Listing submitted electronically as a text file. This text file, which was named “5004.01 2006-05-19 SEQ LIST (TXT) BGJ.ST25.txt”, was created on May 19, 2006, and is 918,031 bytes in size. Its contents are incorporated by reference herein in their entirety.

### FIELD OF THE INVENTION

[0003] The present invention generally relates to pharmaceuticals and methods of treating diseases, particularly to methods and pharmaceutical compositions for treating viral infections.

### BACKGROUND OF THE INVENTION

[0004] Viruses are the smallest of parasites, and are completely dependent on the cells they infect for their reproduction. Viruses are composed of an outer coat of protein, which is sometimes surrounded by a lipid envelope, and an inner nucleic acid core consisting of either RNA or DNA. Generally, after docking with the plasma membrane of a susceptible cell, the viral core penetrates the cell membrane to initiate the viral infection. After infecting cells, viruses commandeer the cell's molecular machinery to direct their own replication and packaging. The “replicative phase” of the viral lifecycle may begin immediately upon entry into the cell, or may occur after a period of dormancy or latency. After the infected cell synthesizes sufficient amounts of viral components, the “packaging phase” of the viral life cycle begins and new viral particles are assembled. Some viruses reproduce without killing their host cells, and many of these bud from host cell membranes. Other viruses cause their host cells to lyse or burst, releasing the newly assembled viral particles into the surrounding environment, where they can begin the next round of their infectious cycle.

[0005] Several hundred different types of viruses are known to infect humans, however, since many of these have only recently been recognized, their clinical significance is not fully understood. Of these viruses that infect humans, many infect their hosts without producing overt symptoms, while others (e.g., influenza) produce a well-characterized set of symptoms. Importantly, although symptoms can vary with the virulence of the infecting strain, identical viral strains can have drastically different effects depending upon the health and immune response of the host. Despite remarkable achievements in the development of vaccines for certain viral infections (i.e., polio and measles), and the eradication of specific viruses from the human population (e.g., smallpox), viral diseases remain as important medical and public health problems. Indeed, viruses are responsible for several “emerging” (or reemerging) diseases (e.g., West Nile encephalitis & Dengue fever), and also for the largest pandemic in the history of mankind (HIV and AIDS).

[0006] Viruses that primarily infect humans are spread mainly via respiratory and enteric excretions. These viruses are found worldwide, but their spread is limited by inborn resistance, prior immunizing infections or vaccines, sanitary and other public health control measures, and prophylactic antiviral drugs. Zoonotic viruses pursue their biologic cycles chiefly in animals, and humans are secondary or accidental hosts. These viruses are limited to areas and environments able to support their nonhuman natural cycles of infection (vertebrates or arthropods or both). However, with increased global travel by humans, and the likely accidental co-transport of arthropod vectors bearing viral payloads, many zoonotic viruses are appearing in new areas and environments as emerging diseases. For example, West Nile virus, which is spread by the bite of an infected mosquito, and can infect people, horses, many types of birds, and other animals, was first isolated from a febrile adult woman in the West Nile District of Uganda in 1937. The virus made its first appearance in the Western Hemisphere, in the New York City area in the autumn of 1999, and during its first year in North America, caused the deaths of 7 people and the hospitalization of 62. At the time of this writing (August, 2002) the virus has been detected in birds in 37 states and the District of Columbia, and confirmed human infections have occurred in Alabama, the District of Columbia, Florida, Illinois, Indiana, Louisiana, Massachusetts, Mississippi, Missouri, New York City, Ohio, and Texas. (See: http://www.cdc.gov/od/oc/media/wncount.htm).

[0007] Additionally, some viruses are known to have oncogenic properties. Human T-cell lymphotropic virus type 1 (a retrovirus) is associated with human leukemia and lymphoma. Epstein-Barr virus has been associated with malignancies such as nasopharyngeal carcinoma, Burkitt's lymphoma, Hodgkin's disease, and lymphomas in immunosuppressed organ transplant recipients. Kaposi's sarcoma-associated virus is associated with Kaposi's sarcoma, primary effusion lymphomas, and Castleman's disease (a lymphoproliferative disorder).

[0008] Treatment of viral diseases presents unique challenges to modern medicine. Since viruses depend on host cells to provide many functions necessary for their multiplication, it is difficult to inhibit viral replication without at the same time affecting the host cell itself. Consequently, antiviral treatments are often directed at the functions of specific enzymes of particular viruses. However, such antiviral treatments that specifically target viral enzymes (e.g., HIV protease, or HIV reverse transcriptase) often have limited usefulness, because resistant strains of viruses readily arise through genetic drift and mutation.

### SUMMARY OF THE INVENTION

[0009] The present invention provides a method for inhibiting viral budding from virus-infected cells and thus inhibiting viral propagation in the cells. The method can be useful in treating infection by viruses that utilize the Tsg101 protein of their host cells for viral budding within and/or out of the cells. In general, the method comprises administering to a patient in need of such treatment a composition comprising a peptide having an amino acid sequence motif PX₁X₂P and is capable of binding the UEV domain of Tsg101, wherein X₁ and X₂ are amino acids, and X₂ is not R. Preferably, X₁ is threonine (T) or serine (S), and X₂ is alanine (A). Preferably the peptide is associated with a transporter that is capable of increasing the uptake of the peptide by a mammalian cell by at least 100%, preferably at least 300%.

[0010] Thus, the method can be used in treating infection by viruses such as HIV, Ebola virus, HBV, HSV1, HSV2, HSV5, EBV, Influenza A virus, HPV, HTLV-2, West Nile virus, Measles virus, Rubella virus, Colorado tick fever virus, foot-and-mouth disease virus, human foamy virus, hepatitis E virus, hepatitis G virus, human parechovirus 2, and Semliki forest virus. In a preferred embodiment, the method is used in treating HIV infection and AIDS, and/or preventing AIDS. When the method is used in treating HIV infection, preferably the peptide does not contain a contiguous amino acid sequence of an HIV GAG protein that is sufficient to impart an ability to bind the UEV domain of Tsg101 on said peptide.

[0011] In preferred embodiments, the peptide in the composition is covalently linked to the transporter. Advantageously, the transporter is selected from the group consisting of penetratins, l-Tat₄₉₋₅₇, d-Tat₄₉₋₅₇, retro-inverso isomers of l- or d-Tat₄₉₋₅₇, L-arginine oligomers, D-arginine oligomers, L-lysine oligomers, D-lysine oligomers, L-histidine oligomers, D-histidine oligomers, L-ornithine oligomers, D-ornithine oligomers, fibroblast growth factor and fragments thereof, Galparan and fragments thereof, and HSV-1 structural protein VP22 and fragments thereof, and peptoid analogs thereof. Preferably, the transporter is a peptide having at least six contiguous amino acid residues that are L-arginine, D-arginine, L-lysine, D-lysine, L-histidine, D-histidine, L-ornithine, D-ornithine, or a combination thereof. Alternatively, the transporter can be non-peptidic molecules or structures such as liposomes, dendrimers, and siderophores.

[0012] In specific embodiments, the peptide in the composition includes a contiguous amino acid sequence of from 8 to about 100 residues, preferably from 8 to about 50 residues, more preferably from 9 to about 20 residues, of a viral protein selected from the group consisting of HIV GAG, Ebola virus Matrix (EbVp40) protein, HBV PreS1/PreS2/S envelope protein, HSV1 RL2 protein, HSV2 virion glycoprotein K, HSV2 Strain 333 glycoprotein I, EBV nuclear protein EBNA2, Influenza A virus hemagglutinin, HPV L1 proteins, HPV L2 proteins, HPV late proteins, HTLV-2 GAG protein, West Nile virus polyprotein precursor, Measles virus matrix protein, Rubella virus non-structural protein, Colorado tick fever virus VP12, foot-and-mouth disease virus VP1 capsid protein, human foamy virus GAG protein, hepatitis E virus ORF-3 protein, hepatitis G virus polyprotein precursor, HSV5 UL32 protein, human parechovirus 2 polyprotein, and Semliki forest virus polyprotein, and wherein the contiguous amino acid sequence encompasses the P(T/S)AP motif of the viral protein. For example, the peptide used in the composition can include an amino acid sequence selected from the group consisting of SEQ ID NOs:1-37, SEQ ID NOs:38-125, SEQ ID NOs:126-268, SEQ ID NOs:269-554, SEQ ID NOs:555-697, SEQ ID NOs:698-749, SEQ ID NOs:750-892, SEQ ID NOs:893-1035, SEQ ID NOs:1036-1178, SEQ ID NOs:1179-1321, SEQ ID NOs:1322-1464, SEQ ID NOs:1465-1607, SEQ ID NOs:1608-1750, SEQ ID NOs:1751-1893, SEQ ID NOs:1894-2036, SEQ ID NOs:2037-2179, SEQ ID NOs:2180-2322, SEQ ID NOs:2323-2459, SEQ ID NOs:2460-2602, SEQ ID NOs:2603-2745, SEQ ID NOs:2746-2887, SEQ ID NOs:2888-3030, SEQ ID NOs:3031-3173, SEQ ID NOs:3174-3316, and SEQ ID NOs:3317-3459.

[0013] In preferred embodiments, the transporter in the composition according to the method of the present invention is capable of increasing the uptake of said peptide by a mammalian cell by at least 100%, preferably at least 300%.

[0014] When the transporter used in the method of the present invention is a peptide, a hybrid polypeptide or fusion polypeptide is provided. The hybrid polypeptide includes (a) a first portion having an amino acid sequence motif PX₁X₂P capable of binding the UEV domain of Tsg101, wherein X₁ and X₂ are amino acids, and X₂ is not R, and (b) a second portion which is a peptidic transporter capable of increasing the uptake of the first portion by human cells. Advantageously, the transporter is capable of increasing the uptake of said peptide by a mammalian cell by at least 100%, preferably at least 300%. Preferably, the first portion consists of from 8 to 100, more preferably 8 to 50, even more preferably 9 to 20 amino acid residues. The hybrid polypeptide can be chemically synthesized or produced by recombinant expression. Thus, the present invention also provides isolated nucleic acids encoding the hybrid polypeptides, and host cells recombinantly expressing the hybrid polypeptides.

[0015] The peptide of the present invention can be administered to a patient in the presence or absence of a transporter. The peptide with or without a transporter can be administered directly to a patient in a pharmaceutical composition. Alternatively, the peptide or hybrid polypeptide according to the present invention can be introduced into a patient indirectly by administering to the patient a nucleic acid encoding the peptide or hybrid polypeptide.

[0016] Various modifications may be made to improve the stability and solubility of the peptides or hybrid polypeptides, and/or optimize its binding affinity to the UEV domain of Tsg101. In particular, various protection groups can be incorporated into the amino acid residues of the peptides or hybrid polypeptides. In addition, the compounds according to the present invention can also be in various pharmaceutically acceptable salt forms.

[0017] In another aspect of the present invention, methods of combination therapy for treating or preventing HIV and/or AIDS, and other viral infection are provided. In such methods, both a compound of the present invention (in the presence or absence of a transporter) and one or more other antiviral compounds are administered to a patient in need of treatment. Such other antiviral compounds should be pharmaceutically compatible with the compound of the present invention. Compounds suitable for use in combination therapies with the Tsg101-binding compounds according to the present invention include, but are not limited to, any small molecule drugs, antibodies, immunomodulators, and vaccines.

[0018] In accordance with another aspect of the present invention, isolated peptides are provided consisting of a contiguous amino acid sequence of from 8 to about 30 amino acid residues of a viral protein selected from the group consisting of HBV PreS1/PreS2/S envelope protein, HSV1 RL2 protein, HSV2 virion glycoprotein K, HSV2 Strain 333 glycoprotein I, EBV nuclear protein EBNA2, Influenza A virus hemagglutinin, HPV L1 proteins, HPV L2 proteins, HPV late proteins, HTLV-2 GAG protein, West Nile virus polyprotein precursor, Measles virus matrix protein, Rubella virus non-structural protein, Colorado tick fever virus VP12, foot-and-mouth disease virus VP1 capsid protein, human foamy virus GAG protein, hepatitis G virus polyprotein precursor, human parechovirus 2 polyprotein, and Semliki forest virus polyprotein, wherein the contiguous amino acid sequence encompasses the P(T/S)AP motif of the viral protein, and wherein the peptide is capable of binding the UEV domain of Tsg101. Preferably, the peptide does not contain a contiguous amino acid sequence of an HIV GAG protein or Ebola virus Matrix (EbVp40) protein that is sufficient to impart an ability to bind the UEV domain of Tsg101 on the peptide. In addition, the present invention also provides isolated nucleic acids encoding the isolated peptides.

[0019] In preferred embodiments, the isolated peptide consists of from 9 to about 20 amino acid residues. For example, such isolated peptides may include an amino acid sequence selected from the group consisting of SEQ ID NOs:38-125, SEQ ID NOs:126-268, SEQ ID NOs:269-554, SEQ ID NOs:555-697, SEQ ID NOs:698-749, SEQ ID NOs:750-892, SEQ ID NOs:893-1035, SEQ ID NOs:1036-1178, SEQ ID NOs:1179-1321, SEQ ID NOs:1322-1464, SEQ ID NOs:1465-1607, SEQ ID NOs:1608-1750, SEQ ID NOs:1751-1893, SEQ ID NOs:1894-2036, SEQ ID NOs:2037-2179, SEQ ID NOs:2180-2322, SEQ ID NOs:2323-2459, SEQ ID NOs:2460-2602, SEQ ID NOs:2603-2745, SEQ ID NOs:2888-3030, SEQ ID NOs:3174-3316, and SEQ ID NOs:3317-3459.

[0020] The foregoing and other advantages and features of the invention, and the manner in which the same are accomplished, will become more readily apparent upon consideration of the following detailed description of the invention taken in conjunction with the accompanying examples, which illustrate preferred and exemplary embodiments.

### BRIEF DESCRIPTION OF THE DRAWINGS

[0021] FIG. 1 is a competitive inhibition curve showing that the p(1-14) peptide having the first 14 amino acid residues is capable of inhibiting protein-protein interaction between GST-p6 and myc-Tsg101(1-207);

[0022] FIG. 2 is a Dixon plot showing p6(1-14) inhibition of the interaction between GST-p6 and myc-Tsg101(1-207);

[0023] FIG. 3 is another Dixon plot showing p6(1-14) inhibition of the interaction between GST-p6 and myc-Tsg101(1-207);

[0024] FIG. 4 is the graphical test results showing the effect of the compound MPI-PEP1 at various concentrations on HIV viral propagation in cell culture and on cell viability in the cell culture;

[0025] FIG. 5 is the graphical test results of the compound MPI-PEP2;

[0026] FIG. 6 is the graphical test results of the compound MPI-PEP3; and

[0027] FIG. 7 is the graphical test results of AZT as a positive control compound.

### DETAILED DESCRIPTION OF THE INVENTION

[0028] As used herein, the term “viral infection” generally encompasses infection of an animal host, particularly a human host, by one or more viruses. Thus, treating viral infection will encompass the treatment of a person who is a carrier of one or more specific viruses or a person who is diagnosed of active symptoms caused by and/or associated with infection by the viruses. A carrier of virus may be identified by any methods known in the art. For example, a person can be identified as virus carrier on the basis that the person is antiviral antibody positive, or is virus-positive, or has symptoms of viral infection. That is, “treating viral infection” should be understood as treating a patient who is at any one of the several stages of viral infection progression. In addition, “treating or preventing viral infection” will also encompass treating suspected infection by a particular virus after suspected past exposure to virus by e.g., blood transfusion, exchange of body fluids, bites, accidental needle stick, or exposure to patient blood during surgery, or other contacts with a person with viral infection that may result in transmission of the virus.

[0029] Specifically, as used herein, the term “HIV infection” generally encompasses infection of a host animal, particularly a human host, by the human immunodeficiency virus (HIV) family of retroviruses including, but not limited to, HIV I, HIV II, HIV III (a.k.a. HTLV-III, LAV-1, LAV-2), and the like. “HIV” can be used herein to refer to any strains, forms, subtypes, clades and variations in the HIV family. Thus, treating HIV infection will encompass the treatment of a person who is a carrier of any of the HIV family of retroviruses or a person who is diagnosed of active AIDS, as well as the treatment or prophylaxis of the AIDS-related conditions in such persons. A carrier of HIV may be identified by any methods known in the art. For example, a person can be identified as HIV carrier on the basis that the person is anti-HIV antibody positive, or is HIV-positive, or has symptoms of AIDS. That is, “treating HIV infection” should be understood as treating a patient who is at any one of the several stages of HIV infection progression, which, for example, include acute primary infection syndrome (which can be asymptomatic or associated with an influenza-like illness with fevers, malaise, diarrhea and neurologic symptoms such as headache), asymptomatic infection (which is the long latent period with a gradual decline in the number of circulating CD⁴⁺ T cells), and AIDS (which is defined by more serious AIDS-defining illnesses and/or a decline in the circulating CD4 cell count to below a level that is compatible with effective immune function). In addition, “treating or preventing HIV infection” will also encompass treating suspected infection by HIV after suspected past exposure to HIV by e.g., contact with HIV-contaminated blood, blood transfusion, exchange of body fluids, “unsafe” sex with an infected person, accidental needle stick, receiving a tattoo or acupuncture with contaminated instruments, or transmission of the virus from a mother to a baby during pregnancy, delivery or shortly thereafter. The term “treating HIV infection” may also encompass treating a person who has not been diagnosed as having HIV infection but is believed to be at risk of infection by HIV.

[0030] The term “treating AIDS” means treating a patient who exhibits more serious AIDS-defining illnesses and/or a decline in the circulating CD4 cell count to below a level that is compatible with effective immune function. The term “treating AIDS” also encompasses treating AIDS-related conditions, which means disorders and diseases incidental to or associated with AIDS or HIV infection such as AIDS-related complex (ARC), progressive generalized lymphadenopathy (PGL), anti-HIV antibody positive conditions, and HIV-positive conditions, AIDS-related neurological conditions (such as dementia or tropical paraparesis), Kaposi's sarcoma, thrombocytopenia purpurea and associated opportunistic infections such as Pneumocystis carinii pneumonia, Mycobacterial tuberculosis, esophageal candidiasis, toxoplasmosis of the brain, CMV retinitis, HIV-related encephalopathy, HIV-related wasting syndrome, etc.

[0031] Thus, the term “preventing AIDS” as used herein means preventing in a patient who has HIV infection or is suspected to have HIV infection or is at risk of HIV infection from developing AIDS (which is characterized by more serious AIDS-defining illnesses and/or a decline in the circulating CD4 cell count to below a level that is compatible with effective immune function) and/or AIDS-related conditions.

[0032] The terms “polypeptide,” “protein,” and “peptide” are used herein interchangeably to refer to amino acid chains in which the amino acid residues are linked by peptide bonds or modified peptide bonds. The amino acid chains can be of any length of greater than two amino acids. Unless otherwise specified, the terms “polypeptide,” “protein,” and “peptide” also encompass various modified forms thereof. Such modified forms may be naturally occurring modified forms or chemically modified forms. Examples of modified forms include, but are not limited to, glycosylated forms, phosphorylated forms, myristoylated forms, palmitoylated forms, ribosylated forms, acetylated forms, etc. Modified forms also encompass pharmaceutically acceptable salt forms. In addition, modifications also include intra-molecular crosslinking and covalent attachment to various moieties such as lipids, flavin, biotin, polyethylene glycol or derivatives thereof, etc. In addition, modifications may also include cyclization, and branching. Further, amino acids other than the conventional twenty amino acids encoded by genes may also be included in a polypeptide.

[0033] As used herein, the term “Tsg101” means human Tsg101 protein, unless otherwise specified.

[0034] As disclosed in commonly assigned co-pending applications, mature HIV-1_{NYU/BR5} p6 (gag polyprotein amino acids 449-500) was used as a bait in a yeast two-hybrid system to screen a prey library derived from human spleen cDNA. A gene encoding the tumor suppressor TSG 101 protein (Tsg101; aa 7-390) was isolated as an interactor. The p6 bait used here contains a late domain motif (-PTAP-).

[0035] In addition, different p6 point mutants (E6G, P7L, A9R, or P10L) were generated and tested for their ability to bind Tsg101 protein. While the wild-type p6 peptide and the E6G p6 mutant were capable of binding Tsg101 protein, each of the P7L, A9R, and P10L point mutations abolishes the p6 binding affinity to Tsg101. The P7L, A9R, and P10L point mutations alter the PTAP motif in p6 peptide. The same mutations in the PTAP motif of the HIV p6 gag protein prevent HIV particles from budding from the host cells. See Huang et al., J. Virol., 69:6810-6818 (1995).

[0036] As is known in the art, the P(T/S)AP motif is conserved among the p6^{gag} domains of all known primate lentiviruses. In nonprimate lentiviruses, which lack a p6^{gag} domain, the P(T/S)AP motif is at the immediate C terminus of the Gag polyprotein. It has been shown that the P(T/S)AP motif is required for efficient pinching off of the lentivirus bud from the host cell surface. It is critical for lentivirus' particularly HIV virus' particle production. See Huang et al., J. Virol., 69:6810-6818 (1995). Specifically, deletion of the motif (PTAP⁻) results in drastic reduction of lentiviral particle production. In addition, the PTAP-deficient HIV proceeded through the typical stages of morphogenesis but failed to complete the process. Rather, they remain tethered to the plasma membrane and thus rendered non-infectious. That is, the lentiviral budding process is stalled. See Huang et al., J. Virol., 69:6810-6818 (1995).

[0037] Also as disclosed in commonly assigned co-pending applications, it has been found that Tsg101 binds directly to the P(T/S)AP domain of HIV-1 p6. The Tsg101 prey fragment isolated in yeast two-hybrid assay contains the ubiquitin E2 variant (UEV) domain indicating that the UEV domain is involved in the binding to the P(T/S)AP domain. This is consistent with the fact that ubiquitin is required from retrovirus budding and that proteasome inhibition reduces the level of free ubiquitin in HIV-1-infected cells and interferes with the release and maturation of HIV-1 and HIV-2. See Patnaik et al., Proc. Natl. Acad. Sci. USA, 97(24):13069-74 (2000); Schubert et al., Proc. Natl. Acad. Sci. USA, 97(24):13057-62 (2000); Strack et al., Proc. Natl. Acad. Sci. USA, 97(24):13063-8 (2000).

[0038] Tsg101 plays an important role in vacuolar protein sorting (Vps). The Vps pathway sorts membrane-bound proteins for eventual degradation in the lysosome (vacuole in yeast). See Lemmon and Traub, Curr. Opin. Cell. Biol., 12:457-66 (2000). Two alternative entrees into the Vps pathway are via vesicular trafficking from the Golgi (e.g., in degrading misfolded membrane proteins) or via endocytosis from the plasma membrane (e.g., in downregulating surface proteins like epidermal growth factor receptor (EGFR)). Vesicles carrying proteins from either source can enter the Vps pathway by fusing with endosomes. As these endosomes mature, their cargos are sorted for lysosomal degradation via the formation of structures called multivesicular bodies (MVB). MVB are created when surface patches on late endosomes bud into the compartment, forming small (˜50-100 nm) vesicles. A maturing MVB can contain tens or even hundreds of these vesicles. The MVB then fuses with the lysosome, releasing the vesicles for degradation in this hydrolytic organelle. Tsg101 appears to perform important roles in the Vps pathway. For example, deletion of the yeast Tsg101 ortholog (Vps23/Stp22) gives rise to a class E Vps phenotype, blocks vacuolar protein sorting from the golgi, and inhibits surface receptor downregulation. See Babst et al, Traffic, 1:248-258 (2000); Li et al., Mol. Cell Biol., 19:3588-3599 (1999). Mammalian Tsg101 similarly participates in endosomal trafficking. For example, efficient down-regulation of activated EGFR requires Tsg101 function. See Babst et al, Traffic, 1:248-258 (2000); Bishop and Woodman, J. Biol. Chem., 276:11735 (2001).

[0039] It is known that short chains of Ub (1-3 molecules) can “mark” surface receptors for endocytosis and degradation in the lysosome. Hicke, Trends Cell Biol., 9:107-112 (1999); Rotin et al., J. Membr. Biol., 176:1-17 (2000). There is also growing evidence that Ub conjugation (and hydrolysis) plays important roles in targeting proteins into the Vps pathway. See Dupre and Haguenauer-Tsapis, Mol. Cell Biol., 12:421-435 (2001); Losko et al., Mol. Cell Biol., 12:1047-1059 (2001). Several classes of proteins that carry the P(T/S)AP motif are surface receptors known to be degraded via the Vps pathway or function in the Vps pathway. Such proteins include connexins 43 and 45, hepatocyte growth factor-regulated tyrosine kinase substrate (Hrs, a homolog of yeast Vps27p), and secretory carrier membrane protein-3 (Scamp-3). See Fan et al., Biochem. J., 345(3):503-509 (2000); Staub and Rotin., Structure, 4:495-499 (1996); Chin et al., J. Biol. Chem., 276:7069-78 (2001); Komada and Kitamura, Biochem. Biophys. Res. Commun., 281:1065-9 (2001). A plausible role for Tsg101 in this process is to recognize ubiquitinated proteins that carry P(T/S)AP motifs and help coordinate their incorporation into vesicles that bud into the MVB.

[0040] Interestingly, it has been noted that the topologies of viral budding and multivesicular body (MVB) formation are similar. In particular, both processes involve the membrane invaginating away from (rather than into) the cytoplasm. Indeed, these two processes are the only known examples in which cell buds a vesicle out of the cytoplasm, suggesting that viral budding and MVB formation may employ analogous mechanisms.

[0041] In addition, the recruitment of cellular machinery to facilitate virus budding appears to be a general phenomenon, and distinct late domains have been identified in the structural proteins of several other enveloped viruses. See Vogt, Proc. Natl. Acad. Sci. USA, 97:12945-12947 (2000). Two well characterized late domains are the “PY” motif (consensus sequence: PPXY; X=any amino acid) found in membrane-associated proteins from certain enveloped viruses. See Craven et al., J. Virol., 73:3359-3365 (1999); Harty et al., Proc. Natl. Acad. Sci. USA, 97:13871-13876 (2000); Harty et al., J. Virol., 73:2921-2929 (1999); and Jayakar et al., J. Virol., 74:9818-9827 (2000). The cellular target for the PY motif is Nedd4 which also contains a Hect ubiquitin E3 ligase domain. The “YL” motif (YXXL) was found in the Gag protein of equine infectious anemia virus (EIAV). Puffer et al., J. Virol., 71:6541-6546 (1997); Puffer et al., J. Virol., 72:10218-10221 (1998). The cellular receptor for the “YL” motif appears to be the AP-50 subunit of AP-2. Puffer et al., J. Virol., 72:10218-10221 (1998). Interestingly, the late domains such as the P(T/S)AP motif, PY motif and the YL motif can still function when moved to different positions within retroviral Gag proteins, which suggests that they are docking sites for cellular factors rather than structural elements. Parent et al., J. Virol., 69:5455-5460 (1995); Yuan et al., EMBO J., 18:4700-4710 (2000). Moreover, the late domains such as the P(T/S)AP motif, PY motif and the YL motif can function interchangeably. That is one late domain motif can be used in place of another late domain motif without affecting viral budding. Parent et al., J. Virol., 69:5455-5460 (1995); Yuan et al., EMBO J., 18:4700-4710 (2000); Strack et al., Proc. Natl. Acad. Sci. USA, 97:13063-13068 (2000).

[0042] Accordingly, while not wishing to be bound by any theory, it is believed that although the three late domain motifs bind to different cellular targets, they utilize common cellular pathways to effect viral budding. In particular, it is believed that the different cellular receptors for viral late domain motifs feed into common downstream steps of the vacuolar protein sorting (VPS) and MVB pathway. As discussed above, Tsg101 functions in the VPS pathway. Another protein, Vps4 functions in Tsg101 cycling and endosomal trafficking Particularly, Vps4 mutants prevent normal Tsg101 trafficking and induce formation of aberrant, highly vacuolated endosomes that are defective in the sorting and recycling of endocytosed substrates. See Babst et al, Traffic, 1:248-258 (2000); Bishop and Woodman, J. Biol. Chem., 276:11735 (2001).

[0043] While not wishing to be bound by any theory, it is believed that the binding of the P(T/S)AP motif in viral proteins to Tsg101 enables viruses having the P(T/S)AP motif to usurp cellular machinery normally used for MVB formation to allow viral budding from the plasma membrane. It is also believed that Tsg101 serves as the common docking site for all viruses that utilize the P(T/S)AP motif to bud off host cell cytoplasm membrane. In addition, depletion of Tsg101 or interference with the interaction between TSg101 and the P(T/S)AP motif in virus-infected cells would prevent viral budding from the cells. Moreover, an examination of HIV-1 amino acid sequence variants in GenBank using BLAST (Basic Local Alignment Search Tool) identified a number of HIV strains with the standard P(T/S)AP motif being replaced with variations of the P(T/S)AP motif, indicating that such variations may also enable viral budding and that peptides with such variations may also bind Tsg101. Such identified variations include PIAP (SEQ ID NO:3) (see Zhang et al., J. Virol., 71:6662-6670 (1997); Farrar et al., J. Med. Virol., 34:104-113 (1991)), and PTTP (SEQ ID NO:4) (see Zhang et al., J. Virol., 71:6662-6670 (1997).

[0044] In accordance with the present invention, a number of proteins of non-HIV viruses have been found to also contain the P(T/S)AP motif. The proteins are summarized in Table 1 below. The amino acid sequences of such proteins are provided under SEQ ID NOs:3460-3484.

TABLE 1
Viral Proteins Containing the P(T/S)AP Motif

| | P(T/S)AP-Containing | GenBank Accession |
|---|---|---|
| Virus | Protein | No. |
| Ebola Virus | Matrix Protein | AAL25816 |
| HIV | GAG | AF324493 |
| Hepatitis B Virus | PreS1/PreS2/S Envelope | BAA85340 |
| Human Herpesvirus 1 | RL2 | NP_044601 |
| Human Herpesvirus 2 | Virion Glycoprotein K | NP_044524 |
| Human Herpesvirus 2 | Glycoprotein I | P06764 |
| Strain 333 | | |
| Human Herpesvirus | BYRF1, Encodes EBNA-2 | NP_039845 |
| 4/Epstein Barr Virus | | |
| Influenza A Virus | Hemagglutinin | AAG38554 |
| (A/Pintail | | |
| Duck/Alberta/114/79 | | |
| (H8N4)) | | |
| Human Papillomavirus | L1 Protein, My09/My11 | AAA67231 |
| | Region | |
| Human Papillomavirus | Minor Capsid Protein L2 | NP_043365 |
| Type 23 | | |
| Human Papillomavirus | Major Capsid Protein L1 | P27232 |
| Type 35 | | |
| Human Papillomavirus | Minor Capsid Protein L2 | NP_040303 |
| Type 6b | | |
| Human Papillomavirus | Late Protein | NP_041865 |
| Type 9 | | |
| Human T-Cell | Gag Protein | CAA61543 |
| Lymphotropic Virus | | |
| Type 2 | | |
| West Nile Virus | Polyprotein Precursor | NP_041724 |
| Measles Virus | Matrix Protein | CAA34587 |
| Rubella Virus | Non-Structural Protein | BAB32473 |
| Colorado Tick Fever | VP12 | AAB02025 |
| Virus | | |
| Foot-and-Mouth | VP1 Capsid Protein | AAA42637 |
| Disease Virus | | |
| Human Foamy Virus | Gag | NP_044279 |
| Hepatitis E Virus | ORF-3 | AAC35758 |
| Hepatitis G Virus | Polyprotein Precursor | AAB65834 |
| Human Herpesvirus 5 | UL32 | AAG31644 |
| Human Parechovirus 2 | Polyprotein | NP_046804 |
| Semliki Forest Virus | Polyprotein | CAA76683 |

[0045] Thus, the inventors of the present invention propose to employ peptides derived from such viral proteins to treat viral infection including HIV infection as well as infection by other viruses listed in the above Table 1.

[0046] In accordance with a first aspect of the present invention, a method is provided for inhibiting virus budding from virus-infected cells and thus inhibiting viral propagation in the cells. The method includes administering to the cells a compound comprising an amino acid sequence motif of PX₁X₂P and capable of binding the UEV domain of Tsg101, wherein X₁ is any amino acid or amino acid analog and X₂ is an amino acid or amino acid analog other than arginine (R). The compounds can be administered to cells in vitro or cells in vivo in a human or animal body. In the case of in vivo applications of the method, viral infection can be treated and alleviated by using the compound to inhibit viral propagation.

[0047] Preferably, the method is used for inhibiting viral budding of a virus that utilizes the Tsg101 protein of their host cells for viral budding within and/or out of the cells. The method is therefore useful in inhibiting viral propagation. In one embodiment, the method is used for inhibiting viral budding by an animal virus selected from the group consisting of HIV, hepatitis B virus, hepatitis E virus, hepatitis G virus, human papillomavirus, human herpes virus 1 (HSV1), human herpes virus 1 (HSV2), human herpes virus 5 (HSV5), Measles virus, Rubella virus, West Nile virus, human foamy virus, human parechovirus, Colorado tick fever virus, human T-cell lymphotropic virus, influenza A virus, foot-and-mouth disease virus, Ebola virus, and Semliki Forest virus.

[0048] In a preferred embodiments, the method is applied to inhibit viral budding by HIV, hepatitis B virus, HSV1 and HSV2. By inhibiting viral propagation in cells in a patient, the viral load in the patient body can be prevented from increasing and can even be decreased. Accordingly, the method of the present invention can also be used in treating viral infection as well as symptoms caused by and/or associated with the viral infection. In addition, when applied at an early stage before a patient develops a full-blown disease caused by viral infection, the method can be used to prevent such a disease by inhibiting viral propagation and decreasing the viral load in the patient. For example, human hepatitis B virus is known to cause hepatitis which may increase the risk of liver cancer. Thus, if the compounds of the present invention is applied to a patient at an early stage of the hepatitis B viral infection before the full development of hepatitis, hepatitis may be prevented and the likelihood of liver cancer in the patient may be reduced. Similarly, human papillomaviruses are believed to cause cervical cancer. Thus, by treating human papillomavirus infection, the risk of cervical cancer can be reduced.

[0049] The compound which comprises the amino acid sequence motif PX₁X₂P and is capable of binding the UEV domain of Tsg101 can be of any type of chemical compounds so long as the compound is capable of binding the UEV domain of Tsg101. In the case of viruses such foot-and-mouth disease virus which infects animals such as canine and cattles, the compounds to be administered to the animals should be capable of binding the Tsg101 orthologs in the animals. For example, the compound can be a peptide, a modified peptide, an oligonucleotide-peptide hybrid (e.g., PNA), etc. In a preferred embodiment, the compound administered is capable of binding the UEV domain of human Tsg101.

[0050] In one embodiment, in the compound comprising an amino acid sequence motif PX₁X₂P and capable of binding the UEV domain of Tsg101, X₁ is selected from the group consisting of threonine (T), serine (S), and isoleucine (I) and analogs thereof, and X₂ is not R. In another embodiment, the X₂ in the motif is alanine (A) or threonine (T) or an analog thereof. In a more preferred embodiment, the compound administered has the amino acid sequence motif of PX₁X₂P, wherein X₁ is selected from the group consisting of T, S, and I and analogs thereof, and X₂ is A or T or an analog thereof.

[0051] Thus, the compound can be a tetrapeptide having an amino acid sequence of PX₁X₂P, wherein X₂ is an amino acid or an amino acid analog other than arginine. In one embodiment, the tetrapeptide has an amino acid sequence of P(T/S/I)(A/T)P (SEQ ID NOs:1-6). In a preferred embodiment, the tetrapeptide has the sequence of PTAP (SEQ ID NO:1). In another preferred embodiment, the tetrapeptide has the sequence of PSAP (SEQ ID NO. 2).

[0052] The compound can also include a longer peptide comprising the amino acid sequence motif of PX₁X₂P and capable of binding the UEV domain of Tsg101. Advantageously, the compound is a peptide that contains an amino acid sequence of less than about 400, 375, 350, 325, 300, 275, 250, 225 or 200 residues. Preferably, the peptide contains an amino acid sequence of less than about 175, 150, 125, 115, 100, 95, 90, 85, 80, 75, 70, 65, 60 or 55 residues. More preferably, the peptide contains an amino acid sequence of less than about 50, 48, 45, 42, 40, 38, 35, 33, 32, 31, 30, 29, 28, 27, 26, 25, 24, 23, 22, 21 or 20 residues. In preferred embodiments, the peptide contains an amino acid sequence of from about 4 to about 200, 6 to about 150, 8 to about 100, preferably from about 8 to about 50, more preferably from about 9 to about 50, from about 9 to 45, 9 to 40, 9 to 37, 9 to 35, 9 to 30, 9 to 25 residues. More advantageously, the peptide contains an amino acid sequence of from 9 to about 10, 11, 12, 13, 14, 15, 16, 17, 18, 19, 20, 21, 22, 23 or 24 residues, even more advantageously, from 10 to about 11, 12, 13, 14, 15, 16, 17, 18, 19, 20, 21, 22, 23 or 24 residues. Preferably, the PX₁X₂P motif in the sequence is the P(T/S)AP motif.

[0053] In a preferred embodiment, the compound includes a peptide that contains a contiguous amino acid sequence of an HIV GAG protein and is capable of binding the UEV domain of Tsg101. The contiguous amino acid sequence encompasses the late domain motif of the GAG protein, which can be the P(T/S/I)(A/T)P motif or a variant thereof.

[0054] In specific embodiments, the compound includes an amino acid sequence selected from the group of EPTAP (SEQ ID NO:7), EPSAP (SEQ ID NO:8), PTAPP (SEQ ID NO:9), PSAPP (SEQ ID NO:10), EPTAPP (SEQ ID NO:11), EPSAPP (SEQ ID NO:12), PEPTAP(SEQ ID NO:13), PEPSAP (SEQ ID NO:14), RPEPTAP (SEQ ID NO:15), RPEPSAP (SEQ ID NO:16), PEPTAPP (SEQ ID NO:17), PEPSAPP (SEQ ID NO:18), EPTAPPEE (SEQ ID NO:19), EPSAPPEE (SEQ ID NO:20), EPTAPPAE (SEQ ID NO:21), PEPTAPPEE (SEQ ID NO:22), PEPTAPPAE (SEQ ID NO:23), PEPSAPPEE (SEQ ID NO:24), PGPTAPPEE (SEQ ID NO:25), PGPTAPPAE (SEQ ID NO:26), PGPSAPPEE (SEQ ID NO:27), RPEPTAPPEE (SEQ ID NO:28), RPEPSAPPEE (SEQ ID NO:29), RPEPTAPPAE (SEQ ID NO:30), RPEPSAPPAE (SEQ ID NO:31), RPGPTAPPEE (SEQ ID NO:32), RPGPSAPPEE (SEQ ID NO:33), RPGPTAPPAE (SEQ ID NO:34), RPGPSAPPAE (SEQ ID NO:35) LQSRPEPTAPPEE (SEQ ID NO:36), LQSRPEPSAPPEE (SEQ ID NO:37).

[0055] In another embodiment, the compound includes a contiguous amino acid sequence of a viral protein selected from the group consisting of Ebola virus Matrix (EbVp40) protein, HBV PreS1/PreS2/S envelope protein, HSV1 RL2 protein, HSV2 virion glycoprotein K, HSV2 Strain 333 glycoprotein I, EBV nuclear protein EBNA2, Influenza A virus hemagglutinin, HPV L1 proteins, HPV L2 proteins, HPV late proteins, HTLV-2 GAG protein, West Nile virus polyprotein precursor, Measles virus matrix protein, Rubella virus non-structural protein, Colorado tick fever virus VP12, foot-and-mouth disease virus VP1 capsid protein, human foamy virus GAG protein, hepatitis E virus ORF-3 protein, hepatitis G virus polyprotein precursor, HSV5 UL32 protein, human parechovirus 2 polyprotein, and Semliki forest virus polyprotein, and wherein the contiguous amino acid sequence encompasses the P(T/S)AP motif of the viral protein.

[0056] In a specific embodiment, the compound includes a contiguous amino acid sequence of Ebola virus Matrix (EbVp40) protein that encompasses the P(T/S)AP motif of the protein.

[0057] Advantageously, the compound is a peptide that contains a contiguous amino acid sequence of less than about 400, 375, 350, 325, 300, 275, 250, 225 or 200 residues of one of the viral proteins in Table 1, which encompasses the P(T/S)AP motif of the viral protein, and is capable of binding the UEV domain of Tsg101. Preferably, the peptide contains a contiguous amino acid sequence of less than about 175, 150, 125, 115, 100, 95, 90, 85, 80, 75, 70, 65, 60 or 55 residues of one of the viral proteins in Table 1, which encompasses the P(T/S)AP motif of the viral protein, and is capable of binding the UEV domain of Tsg101. More preferably, the peptide contains a contiguous amino acid sequence of less than about 50, 48, 45, 42, 40, 38, 35, 33, 32, 31, 30, 29, 28, 27, 26, 25, 24, 23, 22, 21 or 20 residues of one of the viral proteins in Table 1, which encompasses the P(T/S)AP motif of the viral protein, and is capable of binding the UEV domain of Tsg101. In preferred embodiments, the peptide contains a contiguous amino acid sequence of from about 4 to about 50, preferably from about 6 to about 50, from about 8 to about 50, more preferably from about 9 to about 50, from about 9 to 45, 9 to 40, 9 to 37, 9 to 35, 9 to 30, 9 to 25 residues of one of the viral proteins in Table 1, which encompasses the P(T/S)AP motif of the viral protein, and is capable of binding the UEV domain of Tsg101. More advantageously, the peptide contains a contiguous amino acid sequence of from 9 to about 10, 11, 12, 13, 14, 15, 16, 17, 18, 19, 20, 21, 22, 23 or 24 residues of a viral protein in Table 1, even more advantageously, from 10 to about 11, 12, 13, 14, 15, 16, 17, 18, 19, 20, 21, 22, 23 or 24 residues of one of the viral proteins in Table 1, which encompasses the P(T/S)AP motif of the viral protein, and is capable of binding the UEV domain of Tsg101.

[0058] In specific embodiment, the peptide has a contiguous amino acid sequence of Ebola virus Matrix protein as provided in SEQ ID NOs:38-125 in Table 2. In another specific embodiment, the peptide has a contiguous amino acid sequence of HBV PreS1/PreS2/S Envelope protein as provided in SEQ ID NOs:126-268 in Table 3. In another specific embodiment, the peptide has a contiguous amino acid sequence of HSV1 RL2 protein as provided in SEQ ID NOs:269-554 in Table 4. In yet another specific embodiment, the peptide has a contiguous amino acid sequence of HSV2 viron glycoprotein K as provided in SEQ ID NOs:555-697 in Table 5. The peptide can also has a contiguous amino acid sequence of HSV2 Strain 333 glycoprotein I as provided in SEQ ID NOs:698-749 in Table 6. The peptide can also has a contiguous amino acid sequence of EBV nuclear protein EBNA2 as provided in SEQ ID NOs:750-892 in Table 7, of Influenza A virus hemagglutinin as provided in SEQ ID NOs:893-1035 in Table 8, of HPV L1 protein (My09/My11 Region) as provided in SEQ ID NOs:1036-1178 in Table 9, of HPV Type 23 L2 proteins as provided in SEQ ID NOs:1179-1321 in Table 10, of HPV Type 35 L1 protein as provided in SEQ ID NOs:1322-1464 in Table 11, of HPV Type 6b L2 protein as provided in SEQ ID NOs:1465-1607 in Table 12, of HPV Type 9 late protein as provided in SEQ ID NOs:1608-1750 in Table 13, of HTLV-2 GAG protein as provided in SEQ ID NOs:1751-1893 in Table 14, of West Nile virus polyprotein precursor as provided in SEQ ID NOs:1894-2036 in Table 15, of Measles virus matrix protein as provided in SEQ ID NOs:2037-2179 in Table 16, of Rubella virus non-structural protein as provided in SEQ ID NOs:2180-2322 in Table 17, of Colorado tick fever virus VP12 as provided in SEQ ID NOs:2323-2459 in Table 18, of foot-and-mouth disease virus VP1 capsid protein as provided in SEQ ID NOs:2460-2602 in Table 19, of human foamy virus GAG protein as provided in SEQ ID NOs:2603-2745 in Table 20, of hepatitis E virus ORF-3 protein as provided in SEQ ID NOs:2746-2887 in Table 21, of hepatitis G virus polyprotein precursor as provided in SEQ ID NOs:2888-3030 in Table 22, of HSV5 UL32 protein as provided in SEQ ID NOs:3031-3173 in Table 23, of human parechovirus 2 polyprotein as provided in SEQ ID NOs:3174-3316 in Table 24, and of Semliki forest virus polyprotein as provided in SEQ ID NOs:3317-3459 in Table 25.

[0059] In another embodiment, the PX₁X₂P motif in the compound according to the present invention is within an amino acid sequence that is at least 70 percent, preferably at least 80 percent or 85 percent, more preferably at least 90 percent or 95 percent identical to a contiguous span of at least 6, 7, 8 or 9 amino acids, preferably 10, 11, 12, 13, 14, 15 or more amino acids of one of the proteins in Table 1, which spans the late P(T/S)AP motif of the protein. In other embodiments, the PX₁X₂P motif in the compound according to the present invention is within an amino acid sequence that is at least 70 percent, preferably at least 80 percent or 85 percent, more preferably at least 90 percent or 95 percent identical to a contiguous span of at least 6, 7, 8 or 9 amino acids, preferably 10, 11, 12, 13, 14, 15 or more amino acids of a naturally occurring HIV Gag p6 protein or Ebola virus Matrix protein, which spans the late domain motif P(T/S)AP of the protein. In this respect, the percentage identity is determined by the algorithm of Karlin and Altschul, Proc. Natl. Acad. Sci. USA, 90:5873-77 (1993), which is incorporated into the various BLAST programs. Specifically, the percentage identity is determined by the “BLAST 2 Sequences” tool, which is available on the internet at NCBI's website. See Tatusova and Madden, FEMS Microbiol. Lett., 174(2):247-50 (1999). For pairwise protein-protein sequence comparison, the BLASTP 2.1.2 program is employed using default parameters (Matrix: BLOSUM62; gap open: 11; gap extension: 1; x_dropoff: 15; expect: 10.0; and wordsize: 3, with filter). It should be understood that such homologue peptides should retain the ability to bind the UEV domain of Tsg101. Preferably, in such embodiments of the present invention, X₁ in the PX₁X₂P motif is selected from the group consisting of T, S, and I and analog thereof, and X₂ is not R. More preferably, X₁ is selected from the group consisting of T, S, and I and analog thereof, and X₂ is A or T or an analog thereof. Most preferably, X₁ is T or S or an analog thereof, and X₂ is A or an analog thereof.

[0060] The homologues can be made by site-directed mutagenesis based on a late domain motif-containing Gag polyprotein sequence of HIV or Ebola matrix protein, or a protein in Table 1. The site-directed mutagenesis can be designed to generate amino acid substitutions, insertions, or deletions. Methods for conducting such mutagenesis should be apparent to skilled artisans in the field of molecular biology. The resultant homologues can be tested for their binding affinity to the UEV domain of Tsg101.

[0061] The peptide portion in the compounds according to the present invention can also be in a modified form. Various modifications may be made to improve the stability and solubility of the compound, and/or optimize its binding affinity to the UEV domain of Tsg101. Examples of modified forms include, but are not limited to, glycosylated forms, phosphorylated forms, myristoylated forms, palmitoylated forms, ribosylated forms, acetylated forms, etc. Modifications also include intra-molecular crosslinking and covalent attachment to various moieties such as lipids, flavin, biotin, polyethylene glycol or derivatives thereof, etc. In addition, modifications may also include cyclization, and branching. Amino acids other than the conventional twenty amino acids encoded by genes may also be included in a polypeptide sequence in the compound of the present invention. For example, the compounds may include D-amino acids in place of L-amino acids.

[0062] To increase the stability of the compounds according to the present invention, various protection groups can also be incorporated into the amino acid residues of the compounds. In particular, terminal residues are preferably protected. Carboxyl groups may be protected by esters (e.g., methyl, ethyl, benzyl, p-nitrobenzyl, t-butyl or t-amyl esters, etc.), lower alkoxyl groups (e.g., methoxy, ethoxy, propoxy, butoxy, etc.), aralkyloxy groups (e.g., benzyloxy, etc.), amino groups, lower alkylamino or di(lower alkyl)amino groups. The term “lower alkoxy” is intended to mean an alkoxy group having a straight, branched or cyclic hydrocarbon moiety of up to six carbon atoms. Protection groups for amino groups may include lower alkyl, benzyloxycarbonyl, t-butoxycarbonyl, and isobornyloxycarbonyl. “Lower alkyl” is intended to mean an alkyl group having a straight, branched or cyclic hydrocarbon moiety of up to six carbon atoms. In one example, a 5-oxo-L-prolyl residue may be used in place of a prolyl residue. A 5-oxo-L-prolyl residue is especially desirable at the N-terminus of a peptide compound. In another example, when a proline residue is at the C-terminus of a peptide compound, a N-ethyl-L-prolinamide residue may be desirable in place of the proline residue. Various other protection groups known in the art useful in increasing the stability of peptide compounds can also be employed.

[0063] In addition, the compounds according to the present invention can also be in various pharmaceutically acceptable salt forms. “Pharmaceutically acceptable salts” refers to the relatively non-toxic, organic or inorganic salts of the compounds of the present invention, including inorganic or organic acid addition salts of the compound. Examples of such salts include, but are not limited to, hydrochloride salts, hydrobromide salts, sulfate salts, bisulfate salts, nitrate salts, acetate salts, phosphate salts, nitrate salts, oxalate salts, valerate salts, oleate salts, borate salts, benzoate salts, laurate saltes, stearate salts, palmitate salts, lactate salts, tosylate salts, citrate salts, maleate, salts, succinate salts, tartrate salts, naphthylate salts, fumarate salts, mesylate salts, laurylsulphonate salts, glucoheptonate salts, and the like. See, e.g., Berge, et al. J. Pharm. Sci., 66:1-19 (1977).

[0064] Suitable pharmaceutically acceptable salts also include, but are not limited to, alkali metal salts, alkaline earth salts, and ammonium salts. Thus, suitable salts may be salts of aluminum, calcium, lithium, magnesium, potassium, sodium and zinc. In addition, organic salts may also be used including, e.g., salts of lysine, N,N′-dibenzylethylenediamine, chloroprocaine, choline, diethanolamine, ethylenediamine, meglumine (N-methylglucamine), procaine and tris. In addition, metal complex forms (e.g. copper complex compounds, zinc complex compounds, etc.) of the compounds of the present invention may also exhibit improved stability.

[0065] Additionally, as will be apparent to skilled artisans apprised of the present disclosure, peptide mimetics can be designed based on the above-described compounds according to the present invention. However, it is noted that the mimetics must be capable of binding the UEV domain of Tsg101. For example, peptoid analogs of the P(T/S)(A/T)P motif can be prepared using known methods. Peptoids are oligomeric N-substituted glycines. Typically, various side chain groups can be included when forming an N-substituted glycine (peptoid monomer) that mimics a particular amino acid. Peptoid monomers can be linked together to form an oligomeric N-substituted glycines-peptoid. Peptoids are easy to synthesize in large amounts. In contrast to peptides, the backbone linkage of peptoids are resistant to hydrolytic enzymes. In addition, since a variety of functional groups can be presented as side chains off of the oligomeric backbone, peptoid analogs corresponding to any peptides can be produced with improved characterics. See Simon et al., Proc. Natl. Acad. Sci. USA, 89:9367-9371 (1992); Figliozzi et al., Methods Enzymol., 267:437-447 (1996); Horwell, Trends Biotechnol., 13:132-134 (1995); and Horwell, Drug Des. Discov., 12:63-75 (1994), all of which are incorporated herein by reference.

[0066] Thus, peptoid analogs of the above-described compounds of the present invention can be made using methods known in the art. The thus prepared peptoid analogs can be tested for their binding affinity to Tsg101. They can also be tested in anti-viral assays for their ability to inhibit virus budding from infected host cells and ability to inhibit virus propagation.

[0067] Mimetics of the compounds of the present invention can also be selected by rational drug design and/or virtual screening. Methods known in the art for rational drug design can be used in the present invention. See, e.g., Hodgson et al., Bio/Technology, 9:19-21 (1991); U.S. Pat. Nos. 5,800,998 and 5,891,628, all of which are incorporated herein by reference. An example of rational drug design is the development of HIV protease inhibitors. See Erickson et al., Science, 249:527-533 (1990). Structural information on the UEV domain of Tsg101 and/or the binding complex formed by the Tsg101 UEV domain and the HIV Gag p6 P(T/S)AP motif or a protein in Table 1 are obtained. The interacting complex can be studied using various biophysics techniques including, e.g., X-ray crystallography, NMR, computer modeling, mass spectrometry, and the like. Likewise, structural information can also be obtained from protein complexes formed by the Tsg101 UEV domain and a variation of the PTAP motif.

[0068] Computer programs are employed to select compounds based on structural models of the binding complex formed by the Tsg101 UEV domain and the HIV Gag p6 P(T/S)AP motif or the P(T/S)AP motif in one of the proteins in Table 1. In addition, once an effective compound is identified, structural analogs or mimetics thereof can be produced based on rational drug design with the aim of improving drug efficacy and stability, and reducing side effects.

[0069] In addition, understanding of the interaction between the Tsg101 UEV domain and compounds of the present invention can also be derived from mutagenesis analysis using yeast two-hybrid system or other methods for detection protein-protein interaction. In this respect, various mutations can be introduced into the interacting proteins and the effect of the mutations on protein-protein interaction is examined by a suitable method such as in vitro binding assay or the yeast two-hybrid system.

[0070] Various mutations including amino acid substitutions, deletions and insertions can be introduced into the protein sequence of the Tsg101 UEV domain and/or a compound of the present invention using conventional recombinant DNA technologies. Generally, it is particularly desirable to decipher the protein binding sites. Thus, it is important that the mutations introduced only affect protein-protein interaction and cause minimal structural disturbances. Mutations are preferably designed based on knowledge of the three-dimensional structure of the interacting proteins. Preferably, mutations are introduced to alter charged amino acids or hydrophobic amino acids exposed on the surface of the proteins, since ionic interactions and hydrophobic interactions are often involved in protein-protein interactions. Alternatively, the “alanine scanning mutagenesis” technique is used. See Wells, et al., Methods Enzymol., 202:301-306 (1991); Bass et al., Proc. Natl. Acad. Sci. USA, 88:4498-4502 (1991); Bennet et al., J. Biol. Chem., 266:5191-5201 (1991); Diamond et al., J. Virol., 68:863-876 (1994). Using this technique, charged or hydrophobic amino acid residues of the interacting proteins are replaced by alanine, and the effect on the interaction between the proteins is analyzed using e.g., an in vitro binding assay. In this manner, the domains or residues of the proteins important to compound-target interaction can be identified.

[0071] Based on the structural information obtained, structural relationships between the Tsg101 UEV domain and a compound of the present invention are elucidated. The moieties and the three-dimensional structures critical to the interaction are revealed. Medicinal chemists can then design analog compounds having similar moieties and structures.

[0072] The residues or domains critical to the modulating effect of the identified compound constitute the active region of the compound known as its “pharmacophore.” Once the pharmacophore has been elucidated, a structural model can be established by a modeling process that may incorporate data from NMR analysis, X-ray diffraction data, alanine scanning, spectroscopic techniques and the like. Various techniques including computational analysis, similarity mapping and the like can all be used in this modeling process. See e.g., Perry et al., in OSAR: Quantitative Structure-Activity Relationships in Drug Design, pp. 189-193, Alan R. Liss, Inc., 1989; Rotivinen et al., Acta Pharmaceutical Fennica, 97:159-166 (1988); Lewis et al., Proc. R. Soc. Lond., 236:125-140 (1989); McKinaly et al., Annu. Rev. Pharmacol. Toxiciol., 29:111-122 (1989). Commercial molecular modeling systems available from Polygen Corporation, Waltham, Mass., include the CHARMm program, which performs the energy minimization and molecular dynamics functions, and QUANTA program which performs the construction, graphic modeling and analysis of molecular structure. Such programs allow interactive construction, visualization and modification of molecules. Other computer modeling programs are also available from BioDesign, Inc. (Pasadena, Calif.), Hypercube, Inc. (Cambridge, Ontario), and Allelix, Inc. (Mississauga, Ontario, Canada).

[0073] A template can be formed based on the established model. Various compounds can then be designed by linking various chemical groups or moieties to the template. Various moieties of the template can also be replaced. These rationally designed compounds are further tested. In this manner, pharmacologically acceptable and stable compounds with improved efficacy and reduced side effect can be developed. The compounds identified in accordance with the present invention can be incorporated into a pharmaceutical formulation suitable for administration to an individual.

[0074] The mimetics including peptoid analogs can exhibit optimal binding affinity to the UEV domain of human Tsg101 or animal orthologs thereof. Various known methods can be utilized to test the Tsg101-binding characteristics of a mimetics. For example, the entire Tsg101 protein or a fragment thereof containing the UEV domain may be recombinantly expressed, purified, and contacted with the mimetics to be tested. Binding can be determined using a surface plasmon resonance biosensor. See e.g., Panayotou et al., Mol. Cell. Biol., 13:3567-3576 (1993). Other methods known in the art for estimating and determining binding constants in protein-protein interactions can also be employed. See Phizicky and Fields, et al., Microbiol. Rev., 59:94-123 (1995). For example, protein affinity chromatography may be used. First, columns are prepared with different concentrations of an interacting member, which is covalently bound to the columns. Then a preparation of its interacting partner is run through the column and washed with buffer. The interacting partner bound to the interacting member linked to the column is then eluted. Binding constant is then estimated based on the concentrations of the bound protein and the eluted protein. Alternatively, the method of sedimentation through gradients monitors the rate of sedimentation of a mixture of proteins through gradients of glycerol or sucrose. At concentrations above the binding constant, the two interacting members sediment as a complex. Thus, binding constant can be calculated based on the concentrations. Other suitable methods known in the art for estimating binding constant include but are not limited to gel filtration column such as nonequilibrium “small-zone” gel filtration columns (See e.g., Gill et al., J. Mol. Biol., 220:307-324 (1991)), the Hummel-Dreyer method of equilibrium gel filtration (See e.g., Hummel and Dreyer, Biochim. Biophys. Acta, 63:530-532 (1962)) and large-zone equilibrium gel filtration (See e.g., Gilbert and Kellett, J. Biol. Chem., 246:6079-6086 (1971)), sedimentation equilibrium (See e.g., Rivas and Minton, Trends Biochem., 18:284-287 (1993)), fluorescence methods such as fluorescence spectrum (See e.g., Otto-Bruc et al, Biochemistry, 32:8632-8645 (1993)) and fluorescence polarization or anisotropy with tagged molecules (See e.g., Weiel and Hershey, Biochemistry, 20:5859-5865 (1981)), and solution equilibrium measured with immobilized binding protein (See e.g., Nelson and Long, Biochemistry, 30:2384-2390 (1991)).

[0075] The compounds capable of binding Tsg101 UEV domain according the present invention can be delivered into cells by direct cell internalization, receptor mediated endocytosis, or via a “transporter.” It is noted that the compound administered to cells in vitro or in vivo in the method of the present invention preferably is delivered into the cells in order to achieve optimal results. Thus, preferably, the compound to be delivered is associated with a transporter capable of increasing the uptake of the compound by an animal cell, preferably a mammalian cell, susceptible to infection by a virus, particularly a virus selected from those in Table 1. As used herein, the term “associated with” means a compound to be delivered is physically associated with a transporter. The compound and the transporter can be covalently linked together, or associated with each other as a result of physical affinities such as forces caused by electrical charge differences, hydrophobicity, hydrogen bonds, van der Waals force, ionic force, or a combination thereof. For example, the compound can be encapsulated within a transporter such as a liposome.

[0076] As used herein, the term “transporter” refers to an entity (e.g., a compound or a composition or a physical structure formed from multiple copies of a compound or multiple different compounds) that is capable of facilitating the uptake of a compound of the present invention by a mammalian cell, particularly a human cell. Typically, the cell uptake of a compound of the present invention in the presence of a “transporter” is at least 50% or 75% higher, preferably at least 100% or 200% higher, and more preferably at least 300%, 400% or 500% higher than the cell uptake of the compound in the absence of the “transporter.” Methods of assaying cell uptake of a compound should be apparent to skilled artisans. For example, the compound to be delivered can be labeled with a radioactive isotope or another detectable marker (e.g., a fluorescence marker), and added to cultured cells in the presence or absence of a transporter, and incubated for a time period sufficient to allow maximal uptake. Cells can then be separated from the culture medium and the detectable signal (e.g., radioactivity) caused by the compound inside the cells can be measured. The result obtained in the presence of a transporter can be compared to that obtained in the absence of a transporter.

[0077] Many molecules and structures known in the art can be used as “transporter.” In one embodiment, a penetratin is used as a transporter. For example, the homeodomain of Antennapedia, a Drosophila transcription factor, can be used as a transporter to deliver a compound of the present invention. Indeed, any suitable member of the penetratin class of peptides can be used to carry a compound of the present invention into cells. Penetratins are disclosed in, e.g., Derossi et al., Trends Cell Biol., 8:84-87 (1998), which is incorporated herein by reference. Penetratins transport molecules attached thereto across cytoplasm membranes or nucleus membranes efficiently in a receptor-independent, energy-independent, and cell type-independent manner. Methods for using a penetratin as a carrier to deliver oligonucleotides and polypeptides are also disclosed in U.S. Pat. No. 6,080,724; Pooga et al., Nat. Biotech., 16:857 (1998); and Schutze et al., J. Immunol., 157:650 (1996), all of which are incorporated herein by reference. U.S. Pat. No. 6,080,724 defines the minimal requirements for a penetratin peptide as a peptide of 16 amino acids with 6 to 10 of which being hydrophobic. The amino acid at position 6 counting from either the N- or C-terminal is tryptophan, while the amino acids at positions 3 and 5 counting from either the N- or C-terminal are not both valine. Preferably, the helix 3 of the homeodomain of Drosophila Antennapedia is used as a transporter. More preferably, a peptide having a sequence of the amino acids 43-58 of the homeodomain Antp is employed as a transporter. In addition, other naturally occurring homologs of the helix 3 of the homeodomain of Drosophila Antennapedia can also be used. For example, homeodomains of Fushi-tarazu and Engrailed have been shown to be capable of transporting peptides into cells. See Han et al., Mol. Cells, 10:728-32 (2000). As used herein, the term “penetratin” also encompasses peptoid analogs of the penetratin peptides. Typically, the penetratin peptides and peptoid analogs thereof are covalently linked to a compound to be delivered into cells thus increasing the cellular uptake of the compound.

[0078] In another embodiment, the HIV-1 tat protein or a derivative thereof is used as a “transporter” covalently linked to a compound according to the present invention. The use of HIV-1 tat protein and derivatives thereof to deliver macromolecules into cells has been known in the art. See Green and Loewenstein, Cell, 55:1179 (1988); Frankel and Pabo, Cell, 55:1189 (1988); Vives et al., J. Biol. Chem., 272:16010-16017 (1997); Schwarze et al., Science, 285:1569-1572 (1999). It is known that the sequence responsible for cellular uptake consists of the highly basic region, amino acid residues 49-57. See e.g., Vives et al., J. Biol. Chem., 272:16010-16017 (1997); Wender et al., Proc. Nat'l Acad. Sci. USA, 97:13003-13008 (2000). The basic domain is believed to target the lipid bilayer component of cell membranes. It causes a covalently linked protein or nucleic acid to cross cell membrane rapidly in a cell type-independent manner. Proteins ranging in size from 15 to 120 kD have been delivered with this technology into a variety of cell types both in vitro and in vivo. See Schwarze et al., Science, 285:1569-1572 (1999). Any HIV tat-derived peptides or peptoid analogs thereof capable of transporting macromolecules such as peptides can be used for purposes of the present invention. For example, any native tat peptides having the highly basic region, amino acid residues 49-57 can be used as a transporter by covalently linking it to the compound to be delivered. In addition, various analogs of the tat peptide of amino acid residues 49-57 can also be useful transporters for purposes of this invention. Examples of various such analogs are disclosed in Wender et al., Proc. Nat'l Acad. Sci. USA, 97:13003-13008 (2000) (which is incorporated herein by reference) including, e.g., d-Tat₄₉₋₅₇, retro-inverso isomers of l- or d-Tat₄₉₋₅₇ (i.e., l-Tat₅₇₋₄₉ and d-Tat₅₇₋₄₉), L-arginine oligomers, D-arginine oligomers, L-lysine oligomers, D-lysine oligomers, L-histidine oligomers, D-histidine oligomers, L-ornithine oligomers, D-ornithine oligomers, and various homologues, derivatives (e.g., modified forms with conjugates linked to the small peptides) and peptoid analogs thereof. As used herein, the term “oligomer” means a molecule that includes a covalently linked chain of amino acid residues of the same amino acids having a large enough number of such amino acid residues to confer transporter activities on the molecule. Typically, an oligomer contains at least 6, preferably at least 7, 8, or at least 9 such amino acid residues. In one embodiment, the transporter is a peptide that includes at least six contiguous amino acid residues that are L-arginine, D-arginine, L-lysine, D-lysine, L-histidine, D-histidine, L-ornithine, D-ornithine, or a combination thereof.

[0079] Other useful transporters known in the art include, but are not limited to, short peptide sequences derived from fibroblast growth factor (See Lin et al., J. Biol. Chem., 270:14255-14258 (1998)), Galparan (See Pooga et al., FASEB J. 12:67-77 (1998)), and HSV-1 structural protein VP22 (See Elliott and O'Hare, Cell, 88:223-233 (1997)).

[0080] As the above-described various transporters are generally peptides, fusion proteins can be conveniently made by recombinant expression to contain a transporter peptide covalently linked by a peptide bond to a peptide having the PX₁X₂P motif. Alternatively, conventional methods can be used to chemically synthesize a transporter peptide or a peptide of the present invention or both.

[0081] In addition to peptide-based transporters, various other types of transporters can also be used, including but not limited to cationic liposomes (see Rui et al., J. Am. Chem. Soc., 120:11213-11218 (1998)), dendrimers (Kono et al., Bioconjugate Chem., 10:1115-1121 (1999)), siderophores (Ghosh et al., Chem. Biol., 3:1011-1019 (1996)), etc. In a specific embodiment, the compound according to the present invention is encapsulated into liposomes for delivery into cells.

[0082] Additionally, when a compound according to the present invention is a peptide, it can be administered to cells by a gene therapy method. That is, a nucleic acid encoding the peptide can be administered to in vitro cells or to cells in vivo in a human or animal body. Various gene therapy methods are well known in the art. Successes in gene therapy have been reported recently. See e.g., Kay et al., Nature Genet., 24:257-61 (2000); Cavazzana-Calvo et al., Science, 288:669 (2000); and Blaese et al., Science, 270: 475 (1995); Kantoff, et al., J. Exp. Med., 166:219 (1987).

[0083] In one embodiment, the peptide consists of a contiguous amino acid sequence of from 8 to about 30 amino acid residues of a viral protein selected from the group consisting of HBV PreS1/PreS2/S envelope protein, HSV1 RL2 protein, HSV2 virion glycoprotein K, HSV2 Strain 333 glycoprotein I, EBV nuclear protein EBNA2, Influenza A virus hemagglutinin, HPV L1 proteins, HPV L2 proteins, HPV late proteins, HTLV-2 GAG protein, West Nile virus polyprotein precursor, Measles virus matrix protein, Rubella virus non-structural protein, Colorado tick fever virus VP12, foot-and-mouth disease virus VP1 capsid protein, human foamy virus GAG protein, hepatitis G virus polyprotein precursor, human parechovirus 2 polyprotein, and Semliki forest virus polyprotein, wherein the contiguous amino acid sequence encompasses the P(T/S)AP motif of the viral protein, and wherein the peptide is capable of binding the UEV domain of Tsg101. In specific embodiments, the peptide does not contain a contiguous amino acid sequence of an HIV GAG protein, or of an Ebola virus Matrix (EbVp40) protein, or of a polyprotein precursor, or of hepatitis E virus ORF-3 protein that is sufficient to impart an ability to bind the UEV domain of Tsg101 on said peptide.

[0084] Advantageously, the isolated peptide consists of from 9 to about 20 amino acid residues. Examples of such isolated peptides include peptides having an amino acid sequence selected from the group consisting of SEQ ID NOs:38-125, SEQ ID NOs:126-268, SEQ ID NOs:269-554, SEQ ID NOs:555-697, SEQ ID NOs:698-749, SEQ ID NOs:750-892, SEQ ID NOs:893-1035, SEQ ID NOs:1036-1178, SEQ ID NOs:1179-1321, SEQ ID NOs:1322-1464, SEQ ID NOs:1465-1607, SEQ ID NOs:1608-1750, SEQ ID NOs:1751-1893, SEQ ID NOs:1894-2036, SEQ ID NOs:2037-2179, SEQ ID NOs:2180-2322, SEQ ID NOs:2323-2459, SEQ ID NOs:2460-2602, SEQ ID NOs:2603-2745, SEQ ID NOs:2888-3030, SEQ ID NOs:3174-3316, and SEQ ID NOs:3317-3459.

[0085] Any suitable gene therapy methods may be used for purposes of the present invention. Generally, an exogenous nucleic acid encoding a peptide compound of the present invention is incorporated into a suitable expression vector and is operably linked to a promoter in the vector. Suitable promoters include but are not limited to viral transcription promoters derived from adenovirus, simian virus 40 (SV40) (e.g., the early and late promoters of SV40), Rous sarcoma virus (RSV), and cytomegalovirus (CMV) (e.g., CMV immediate-early promoter), human immunodeficiency virus (HIV) (e.g., long terminal repeat (LTR)), vaccinia virus (e.g., 7.5K promoter), and herpes simplex virus (HSV) (e.g., thymidine kinase promoter). Where tissue-specific expression of the exogenous gene is desirable, tissue-specific promoters may be operably linked to the exogenous gene. In this respect, a CD⁴⁺ T cell-specific promoter will be most desirable. In addition, selection markers may also be included in the vector for purposes of selecting, in vitro, those cells that contain the exogenous nucleic acid encoding the peptide compound of the present invention. Various selection markers known in the art may be used including, but not limited to, e.g., genes conferring resistance to neomycin, hygromycin, zeocin, and the like.

[0086] In one embodiment, the exogenous nucleic acid is incorporated into a plasmid DNA vector. Many commercially available expression vectors may be useful for the present invention, including, e.g., pCEP4, pcDNAI, pIND, pSecTag2, pVAX1, pcDNA3.1, and pBI-EGFP, and pDisplay.

[0087] Various viral vectors may also be used. Typically, in a viral vector, the viral genome is engineered to eliminate the disease-causing capability, e.g., the ability to replicate in the host cells. The exogenous nucleic acid to be introduced into a patient may be incorporated into the engineered viral genome, e.g., by inserting it into a viral gene that is non-essential to the viral infectivity. Viral vectors are convenient to use as they can be easily introduced into tissue cells by way of infection. Once in the host cell, the recombinant virus typically is integrated into the genome of the host cell. In rare instances, the recombinant virus may also replicate and remain as extrachromosomal elements.

[0088] A large number of retroviral vectors have been developed for gene therapy. These include vectors derived from oncoretroviruses (e.g., MLV), viruses (e.g., HIV and SIV) and other retroviruses. For example, gene therapy vectors have been developed based on murine leukemia virus (See, Cepko, et al., Cell, 37:1053-1062 (1984), Cone and Mulligan, Proc. Natl. Acad. Sci. U.S.A., 81:6349-6353 (1984)), mouse mammary tumor virus (See, Salmons et al., Biochem. Biophys. Res. Commun., 159:1191-1198 (1984)), gibbon ape leukemia virus (See, Miller et al., J. Virology, 65:2220-2224 (1991)), HIV, (See Shimada et al., J. Clin. Invest., 88:1043-1047 (1991)), and avian retroviruses (See Cosset et al., J. Virology, 64:1070-1078 (1990)). In addition, various retroviral vectors are also described in U.S. Pat. Nos. 6,168,916; 6,140,111; 6,096,534; 5,985,655; 5,911,983; 4,980,286; and 4,868,116, all of which are incorporated herein by reference.

[0089] Adeno-associated virus (AAV) vectors have been successfully tested in clinical trials. See e.g., Kay et al., Nature Genet. 24:257-61 (2000). AAV is a naturally occurring defective virus that requires other viruses such as adenoviruses or herpes viruses as helper viruses. See Muzyczka, Curr. Top. Microbiol. Immun., 158:97 (1992). A recombinant AAV virus useful as a gene therapy vector is disclosed in U.S. Pat. No. 6,153,436, which is incorporated herein by reference.

[0090] Adenoviral vectors can also be useful for purposes of gene therapy in accordance with the present invention. For example, U.S. Pat. No. 6,001,816 discloses an adenoviral vector, which is used to deliver a leptin gene intravenously to a mammal to treat obesity. Other recombinant adenoviral vectors may also be used, which include those disclosed in U.S. Pat. Nos. 6,171,855; 6,140,087; 6,063,622; 6,033,908; and 5,932,210, and Rosenfeld et al., Science, 252:431-434 (1991); and Rosenfeld et al., Cell, 68:143-155 (1992).

[0091] Other useful viral vectors include recombinant hepatitis viral vectors (See, e.g., U.S. Pat. No. 5,981,274), and recombinant entomopox vectors (See, e.g., U.S. Pat. Nos. 5,721,352 and 5,753,258).

[0092] Other non-traditional vectors may also be used for purposes of this invention. For example, International Publication No. WO 94/18834 discloses a method of delivering DNA into mammalian cells by conjugating the DNA to be delivered with a polyelectrolyte to form a complex. The complex may be microinjected into or taken up by cells.

[0093] The exogenous nucleic acid fragment or plasmid DNA vector containing the exogenous gene may also be introduced into cells by way of receptor-mediated endocytosis. See e.g., U.S. Pat. No. 6,090,619; Wu and Wu, J. Biol. Chem., 263:14621 (1988); Curiel et al., Proc. Natl. Acad. Sci. USA, 88:8850 (1991). For example, U.S. Pat. No. 6,083,741 discloses introducing an exogenous nucleic acid into mammalian cells by associating the nucleic acid to a polycation moiety (e.g., poly-L-lysine, having 3-100 lysine residues), which is itself coupled to an integrin receptor binding moiety (e.g., a cyclic peptide having the amino acid sequence RGD).

[0094] Alternatively, the exogenous nucleic acid or vectors containing it can also be delivered into cells via amphiphiles. See e.g., U.S. Pat. No. 6,071,890. Typically, the exogenous nucleic acid or a vector containing the nucleic acid forms a complex with the cationic amphiphile. Mammalian cells contacted with the complex can readily absorb the complex.

[0095] The exogenous nucleic acid can be introduced into a patient for purposes of gene therapy by various methods known in the art. For example, the exogenous nucleic acid alone or in a conjugated or complex form described above, or incorporated into viral or DNA vectors, may be administered directly by injection into an appropriate tissue or organ of a patient. Alternatively, catheters or like devices may be used for delivery into a target organ or tissue. Suitable catheters are disclosed in, e.g., U.S. Pat. Nos. 4,186,745; 5,397,307; 5,547,472; 5,674,192; and 6,129,705, all of which are incorporated herein by reference.

[0096] In addition, the exogenous nucleic acid encoding a peptide compound of the present invention or vectors containing the nucleic acid can be introduced into isolated cells using any known techniques such as calcium phosphate precipitation, microinjection, lipofection, electroporation, gene gun, receptor-mediated endocytosis, and the like. Cells expressing the exogenous gene may be selected and redelivered back to the patient by, e.g., injection or cell transplantation. The appropriate amount of cells delivered to a patient will vary with patient conditions, and desired effect, which can be determined by a skilled artisan. See e.g., U.S. Pat. Nos. 6,054,288; 6,048,524; and 6,048,729. Preferably, the cells used are autologous, i.e., obtained from the patient being treated.

[0097] When the transporter used in the method of the present invention is a peptidic transporter, a hybrid polypeptide or fusion polypeptide is provided. In preferred embodiments, the hybrid polypeptide includes (a) a first portion comprising an amino acid sequence motif PX₁X₂P, and capable of binding the UEV domain of Tsg101, wherein X₁ and X₂ are amino acids, and X₂ is not R, and (b) a second portion which is a peptidic transporter capable of increasing the uptake of the first portion by human cells. Preferably, the first portion consists of from about 8 to about 100 amino acid residues, more preferably 9 to 20 amino acid residues. Preferably, the peptidic transporter is capable of increasing the uptake of the first portion by a mammalian cell by at least 100%, more preferably by at least 300%. In one embodiment, the first portion does not contain a contiguous amino acid sequence of an HIV GAG protein that is sufficient to impart an ability to bind the UEV domain of Tsg101 on said peptide.

[0098] The hybrid polypeptide can be produced in a patient's body by administering to the patient a nucleic acid encoding the hybrid polypeptide by a gene therapy method as described above. Alternatively, the hybrid polypeptide can be chemically synthesized or produced by recombinantly expression.

[0099] Thus, the present invention also provides isolated nucleic acids encoding the hybrid polypeptides and host cells recombinantly expressing the hybrid polypeptides. Such a host cell can be prepared by introducing into a suitable cell an exogenous nucleic acid encoding one of the hybrid polypeptides by standard molecular cloning techniques as described above. The nucleic acids can be prepared by linked a nucleic acid encoding the first portion and a nucleic acid encoding the second portion. Methods for preparing such nucleic acids and for using them in recombinant expression should be apparent to skilled artisans.

[0100] The compounds according to the present invention capable of binding Tsg101 are a novel class of antiviral compounds distinct from other commercially available compounds. While not wishing to be bound by any theory or hypothesis, it is believed that the compounds according to the present invention inhibit virus through a mechanism distinct from those of the antiviral compounds known in the art. Therefore, it may be desirable to employ combination therapies to administer to a patient both a compound according to the present invention, with or without a transporter, and another anti-viral compound of a different class. However, it is to be understood that such other antiviral compounds should be pharmaceutically compatible with the compound of the present invention. By “pharmaceutically compatible” it is intended that the other anti-viral agent(s) will not interact or react with the above composition, directly or indirectly, in such a way as to adversely affect the effect of the treatment, or to cause any significant adverse side reaction in the patient. In this combination therapy approach, the two different pharmaceutically active compounds can be administered separately or in the same pharmaceutical composition. Compounds suitable for use in combination therapies with the Tsg101-binding compounds according to the present invention include, but are not limited to, small molecule drugs, antibodies, immunomodulators, and vaccines.

[0101] In the case of treating HIV infection and AIDS, and/or preventing AIDS using the compounds of the present invention, another anti-HIV compound may be used with a compound of the present invention in a combination therapy. Compounds suitable for use in combination therapies with the Tsg101-binding compounds according to the present invention include, but are not limited to, HIV protease inhibitors, nucleoside HIV reverse transcriptase inhibitors, non-nucleoside HIV reverse transcriptase inhibitors, HIV integrase inhibitors, immunomodulators, and vaccines.

[0102] Examples of nucleoside HIV reverse transcriptase inhibitors include 3′-Azido-3′-deoxythymidine (Zidovudine, also known as AZT and RETROVIR®), 2′,3′-Didehydro-3′-deoxythymidine (Stavudine, also known as 2′,3′-dihydro-3′-deoxythymidine, d4T, and ZERIT®), (2R-cis)-4-Amino-1-[2-(hydroxymethyl)-1,3-oxathiolan-5-yl]-2(1H)-pyrimidinone (Lamivudine, also known as 3TC, and EPIVIR®), and 2′,3′-dideoxyinosine (ddI).

[0103] Examples of non-nucleoside HIV reverse transcriptase inhibitors include (−)-6-Chloro-4-cyclopropylethynyl-4-trifluoromethyl-1,4-dihydro-2H-3,1-benzoxazin-2-one (efavirenz, also known as DMP-266 or SUSTIVA®) (see U.S. Pat. No. 5,519,021), 1-[3-[(1-methylethyl)amino-1]-2-pyridinyl]-4-[[5-[(methylsulfonyl)amino]-1H-indol-2-yl]carbonyl]piperazine (Delavirdine, see PCT International Patent Application No. WO 91/09849), and (1S,4R)-cis-4-[2-amino-6-(cyclopropylamino)-9H-purin-9-yl]-2-cyclopentene-1-methanol (Abacavir).

[0104] Examples of protease inhibitors include [5S-(5R*,8R*,10R*,11R*)]-10-hydroxy-2-methyl-5-(1-methylethyl)-1-[2-(1-methylethyl)-4-thiazolyl]-3,6-dioxo-8,11-bis(phenylmethyl)-2,4,7,12-tetraazamidecan-13-oic acid 5-thiazolylmethyl ester (Ritonavir, marketed by Abbott as NORVIR®), [3S-[2(2S*,3S*),3a,4ab,8ab]]-N-(1,1-dimethylethyl)decahydro-2-[2-hydroxy-3-[(3-hydroxy-2-methylbenzoyl)amino]-4-(phenylthio)butyl]-3-isoquinolinecarboxamide monomethanesulfonate (Nelfinavir, marketed by Agouron as VIRACEPT®), N-(2(R)-hydroxy-1(S)-indanyl)-2(R)-phenylmethyl-4-(S)-hydroxy-5-(1-(4-(2-benzo[b]furanylmethyl)-2(S)—N′(t-butylcarboxamido)-piperazinyl))-pentaneamide (See U.S. Pat. No. 5,646,148), N-(2(R)-hydroxy-1(S)-indanyl)2(R)-phenylmethyl-4-(S)-hydroxy-5-(1-(4-(3-pyridylmethyl)-2(S)—N′-(t-butylcarboxamido)-piperazinyl))-pentaneamide (Indinavir, marketed by Merck as CRIXIVAN®), 4-amino-N-((2 syn,3S)-2-hydroxy-4-phenyl-3-((S)-tetrahydrofuran-3-yloxycarbonylamino)-butyl)-N-isobutyl-benzenesulfonamide (amprenavir, see U.S. Pat. No. 5,585,397), and N-tert-butyl-decahydro-2-[2(R)-hydroxy-4-phenyl-3(S)-[[N-(2-quinolylcarbonyl)-L-asparaginyl]amino]butyl]-(4aS,8aS)-isoquinoline-3(S)-carboxamide (Saquinavir, marketed by Roche Laboratories as INVIRASE®).

[0105] Examples of suitable HIV integrase inhibitors are disclosed in U.S. Pat. Nos. 6,110,716; 6,124,327; and 6,245,806, which are incorporated herein by reference.

[0106] In addition, antifusogenic peptides disclosed in, e.g., U.S. Pat. No. 6,017,536 can also be included in the combination therapies according to the present invention. Such peptides typically consist of a 16 to 39 amino acid region of a simian immunodeficiency virus (SIV) protein and are identified through computer algorithms capable of recognizing the ALLMOTI5, 107×178×4, or PLZIP amino acid motifs. See U.S. Pat. No. 6,017,536, which is incorporated herein by reference.

[0107] Typically, a compound of the present invention is administered to a patient in a pharmaceutical composition, which typically includes one or more pharmaceutically acceptable carriers that are inherently nontoxic and non-therapeutic. That is, the compounds are used in the manufacture of medicaments for use in the methods of treating viral infection provided in the present invention.

[0108] The pharmaceutical composition according to the present invention may be administered to a subject needing treatment or prevention through any appropriate routes such as parenteral, oral, or topical administration. The active compounds of this invention are administered at a therapeutically effective amount to achieve the desired therapeutic effect without causing any serious adverse effects in the patient treated. Generally, the toxicity profile and therapeutic efficacy of therapeutic agents can be determined by standard pharmaceutical procedures in suitable cell models or animal models or human clinical trials. As is known in the art, the LD₅₀ represents the dose lethal to about 50% of a tested population. The ED₅₀ is a parameter indicating the dose therapeutically effective in about 50% of a tested population. Both LD₅₀ and ED₅₀ can be determined in cell models and animal models. In addition, the IC₅₀ may also be obtained in cell models and animal models, which stands for the circulating plasma concentration that is effective in achieving about 50% of the maximal inhibition of the symptoms of a disease or disorder. Such data may be used in designing a dosage range for clinical trials in humans. Typically, as will be apparent to skilled artisans, the dosage range for human use should be designed such that the range centers around the ED₅₀ and/or IC₅₀, but significantly below the LD₅₀ obtained from cell or animal models.

[0109] Typically, the compounds of the present invention can be effective at an amount of from about 0.01 microgram to about 5000 mg per day, preferably from about 1 microgram to about 2500 mg per day. However, the amount can vary with the body weight of the patient treated and the state of disease conditions. The active ingredient may be administered at once, or may be divided into a number of smaller doses to be administered at predetermined intervals of time. The suitable dosage unit for each administration of the compounds of the present invention can be, e.g., from about 0.01 microgram to about 2000 mg, preferably from about 1 microgram to about 1000 mg.

[0110] In the case of combination therapy, a therapeutically effective amount of another anti-viral compound can be administered in a separate pharmaceutical composition, or alternatively included in the pharmaceutical composition that contains a compound according to the present invention. The pharmacology and toxicology of many of such other anti-viral compounds are known in the art. See e.g., Physicians Desk Reference, Medical Economics, Montvale, N.J.; and The Merck Index, Merck & Co., Rahway, N.J. The therapeutically effective amounts and suitable unit dosage ranges of such compounds used in art can be equally applicable in the present invention.

[0111] It should be understood that the dosage ranges set forth above are exemplary only and are not intended to limit the scope of this invention. The therapeutically effective amount for each active compound can vary with factors including but not limited to the activity of the compound used, stability of the active compound in the patient's body, the severity of the conditions to be alleviated, the total weight of the patient treated, the route of administration, the ease of absorption, distribution, and excretion of the active compound by the body, the age and sensitivity of the patient to be treated, and the like, as will be apparent to a skilled artisan. The amount of administration can also be adjusted as the various factors change over time.

[0112] The active compounds according to this invention can be administered to patients to be treated through any suitable routes of administration. Advantageously, the active compounds are delivered to the patient parenterally, i.e., by intravenous, intramuscular, intraperitoneal, intracisternal, subcutaneous, or intraarticular injection or infusion.

[0113] For parenteral administration, the active compounds can be formulated into solutions or suspensions, or in lyophilized forms for conversion into solutions or suspensions before use. Lyophilized compositions may include pharmaceutically acceptable carriers such as gelatin, DL-lactic and glycolic acids copolymer, D-mannitol, etc. To convert the lyophilized forms into solutions or suspensions, diluent containing, e.g., carboxymethylcellulose sodium, D-mannitol, polysorbate 80, and water may be employed. Lyophilized forms may be stored in, e.g., a dual chamber syringe with one chamber containing the lyophilized composition and the other chamber containing the diluent. In addition, the active ingredient(s) can also be incorporated into sterile lyophilized microspheres for sustained release. Methods for making such microspheres are generally known in the art. See U.S. Pat. Nos. 4,652,441; 4,728,721; 4,849,228; 4,917,893; 4,954,298; 5,330,767; 5,476,663; 5,480,656; 5,575,987; 5,631,020; 5,631,021; 5,643,607; and 5,716,640.

[0114] In a solution or suspension form suitable for parenteral administration, the pharmaceutical composition can include, in addition to a therapeutically or prophylactically effective amount of a compound of the present invention, a buffering agent, an isotonicity adjusting agent, a preservative, and/or an anti-absorbent. Examples of suitable buffering agent include, but are not limited to, citrate, phosphate, tartrate, succinate, adipate, maleate, lactate and acetate buffers, sodium bicarbonate, and sodium carbonate, or a mixture thereof. Preferably, the buffering agent adjusts the pH of the solution to within the range of 5-8. Examples of suitable isotonicity adjusting agents include sodium chloride, glycerol, mannitol, and sorbitol, or a mixture thereof. A preservative (e.g., anti-microbial agent) may be desirable as it can inhibit microbial contamination or growth in the liquid forms of the pharmaceutical composition. Useful preservatives may include benzyl alcohol, a paraben and phenol or a mixture thereof. Materials such as human serum albumin, gelatin or a mixture thereof may be used as anti-absorbents. In addition, conventional solvents, surfactants, stabilizers, pH balancing buffers, and antioxidants can all be used in the parenteral formulations, including but not limited to dextrose, fixed oils, glycerine, polyethylene glycol, propylene glycol, ascorbic acid, sodium bisulfite, and the like. The parenteral formulation can be stored in any conventional containers such as vials, ampoules, and syringes.

[0115] The active compounds can also be delivered orally in enclosed gelatin capsules or compressed tablets. Capsules and tablets can be prepared in any conventional techniques. For example, the active compounds can be incorporated into a formulation which includes pharmaceutically acceptable carriers such as excipients (e.g., starch, lactose), binders (e.g., gelatin, cellulose, gum tragacanth), disintegrating agents (e.g., alginate, Primogel, and corn starch), lubricants (e.g., magnesium stearate, silicon dioxide), and sweetening or flavoring agents (e.g., glucose, sucrose, saccharin, methyl salicylate, and peppermint). Various coatings can also be prepared for the capsules and tablets to modify the flavors, tastes, colors, and shapes of the capsules and tablets. In addition, liquid carriers such as fatty oil can also be included in capsules.

[0116] Other forms of oral formulations such as chewing gum, suspension, syrup, wafer, elixir, and the like can also be prepared containing the active compounds used in this invention. Various modifying agents for flavors, tastes, colors, and shapes of the special forms can also be included. In addition, for convenient administration by enteral feeding tube in patients unable to swallow, the active compounds can be dissolved in an acceptable lipophilic vegetable oil vehicle such as olive oil, corn oil and safflower oil.

[0117] The active compounds can also be administered topically through rectal, vaginal, nasal, bucal, or mucosal applications. Topical formulations are generally known in the art including creams, gels, ointments, lotions, powders, pastes, suspensions, sprays, drops and aerosols. Typically, topical formulations include one or more thickening agents, humectants, and/or emollients including but not limited to xanthan gum, petrolatum, beeswax, or polyethylene glycol, sorbitol, mineral oil, lanolin, squalene, and the like.

[0118] A special form of topical administration is delivery by a transdermal patch. Methods for preparing transdermal patches are disclosed, e.g., in Brown, et al., Annual Review of Medicine, 39:221-229 (1988), which is incorporated herein by reference.

[0119] The active compounds can also be delivered by subcutaneous implantation for sustained release. This may be accomplished by using aseptic techniques to surgically implant the active compounds in any suitable formulation into the subcutaneous space of the anterior abdominal wall. See, e.g., Wilson et al., J. Clin. Psych. 45:242-247 (1984). Sustained release can be achieved by incorporating the active ingredients into a special carrier such as a hydrogel. Typically, a hydrogel is a network of high molecular weight biocompatible polymers, which can swell in water to form a gel like material. Hydrogels are generally known in the art. For example, hydrogels made of polyethylene glycols, or collagen, or poly(glycolic-co-L-lactic acid) are suitable for this invention. See, e.g., Phillips et al., J. Pharmaceut. Sci., 73:1718-1720 (1984).

[0120] The active compounds can also be conjugated, i.e., covalently linked, to a water soluble non-immunogenic high molecular weight polymer to form a polymer conjugate. Preferably, such polymers do not undesirably interfere with the cellular uptake of the active compounds. Advantageously, such polymers, e.g., polyethylene glycol, can impart solubility, stability, and reduced immunogenicity to the active compounds. As a result, the active compound in the conjugate when administered to a patient, can have a longer half-life in the body, and exhibit better efficacy. In one embodiment, the polymer is a peptide such as albumin or antibody fragment Fc. PEGylated proteins are currently being used in protein replacement therapies and for other therapeutic uses. For example, PEGylated adenosine deaminase (ADAGEN®) is being used to treat severe combined immunodeficiency disease (SCIDS). PEGylated L-asparaginase (ONCAPSPAR®) is being used to treat acute lymphoblastic leukemia (ALL). A general review of PEG-protein conjugates with clinical efficacy can be found in, e.g., Burnham, Am. J. Hosp. Pharm., 15:210-218 (1994). Preferably, the covalent linkage between the polymer and the active compound is hydrolytically degradable and is susceptible to hydrolysis under physiological conditions. Such conjugates are known as “prodrugs” and the polymer in the conjugate can be readily cleaved off inside the body, releasing the free active compounds.

[0121] Alternatively, other forms controlled release or protection including microcapsules and nanocapsules generally known in the art, and hydrogels described above can all be utilized in oral, parenteral, topical, and subcutaneous administration of the active compounds.

[0122] Another preferable delivery form is using liposomes as carrier. Liposomes are micelles formed from various lipids such as cholesterol, phospholipids, fatty acids, and derivatives thereof. Active compounds can be enclosed within such micelles. Methods for preparing liposomal suspensions containing active ingredients therein are generally known in the art and are disclosed in, e.g., U.S. Pat. No. 4,522,811, and Prescott, Ed., Methods in Cell Biology, Volume XIV, Academic Press, New York, N.Y. (1976), p. 33 et seq., both of which are incorporated herein by reference. Several anticancer drugs delivered in the form of liposomes are known in the art and are commercially available from Liposome Inc. of Princeton, N.J., U.S.A. It has been shown that liposomes can reduce the toxicity of the active compounds, and increase their stability.

### Example 1

[0123] Yeast two-hybrid assays were utilized to determine the effect of amino acid substitution mutations in the PTAP motif of HIV p6gag on the interaction between Tsg101 and p6gag. To prepare a yeast two-hybrid activation domain-Tsg101 construct, a DNA fragment encompassing the full-length coding sequence for Tsg101 according to GenBank Accession No. U82130 was obtained by PCR from a human fetal brain cDNA library and cloned into the EcoRI/Pst1 sites of the activation domain parent plasmid GADpN2 (LEU2, CEN4, ARS1, ADH1p-SV40NLS-GAL4 (768-881)-MCS (multiple cloning site)-PGK1t, AmpR, ColE1_ori).

[0124] To prepare the yeast two-hybrid DNA binding domain-HIV1 p6gag construct, a DNA fragment corresponding to the HIV1 p6 peptide derived from the HIV1.NL43 strain GAG protein was obtained by PCR from the NL43 containing plasmid R9Δapa and was cloned into the EcoRI/Sal1 sites of the binding domain parent plasmid pGBT.Q. The sequence of the amplified insert is shown in SEQ ID NO:3485. In addition, the amino acid sequence of the HIV-1_{NYU/BR5} GAG is provided in GenBank under Accession No. AF324493 and is listed in SEQ ID NO:3484.

[0125] The following amino acid substitution mutations were introduced by PCR into the HIV1 p6gag sequence in the yeast two-hybrid binding domain-HIV1 p6gag construct described above. The mutations were verified by DNA sequence analysis. Such mutations are summarized in Table 26 below.

TABLE 26
Tested Mutations in p6gag Protein

| Mutant | | | | | | | | | | | | | | | |
|---|---|---|---|---|---|---|---|---|---|---|---|---|---|---|---|
| Construct | p6gag Peptide Sequence Surrounding the PTAP Motif | | | | | | | | | | | | | | |
| p6(wt) | S | R | P | E | P | T | A | P | P | E | E | S | F | R | F |
| p6(E6G) | | | | G | | | | | | | | | | | |
| p6(P7L) | | | | | L | | | | | | | | | | |
| p6(A9R) | | | | | | | R | | | | | | | | |
| p6(P10L) | | | | | | | | L | | | | | | | |

[0126] To test the effect of the mutations, yeast cells of the strain Y189 purchased from Clontech (ura3-52 his3*200 ade2-101 trp1-901 leu2-3,112 met gal4 gal80 URA3::GAL1p-lacZ) were co-transformed with the activation domain-Tsg101 construct and one of the binding domain-mutant p6gag constructs or the binding domain-wild type p6gag construct. Filter lift assays for β-Gal activity were conducted by lifting the transformed yeast colonies with filters, lysing the yeast cells by freezing and thawing, and contacting the lysed cells with X-Gal. Positive β-Gal activity indicates that the p6gag wild type or mutant protein interacts with Tsg101. All binding domain constructs were also tested for self-activation of β-Gal activity. The results are shown in Table 27.

TABLE 27
Interactions Between Tsg101 and p6gag

| | p6(wt) | p6(E6G) | p6(P7L) | p6(A9R) | p6(P10L) |
|---|---|---|---|---|---|
| Tsg101 | + | + | − | − | − |
| p6(wt) | − | | | | |
| p6(E6G) | | − | | | |
| p6(P7L) | | | − | | |
| p6(A9R) | | | | − | |
| p6(P10L) | | | | | − |

[0127] Thus, as is clear from Table 27, the mutations in the PTAP motif of HIV p6gag abolished the interaction between Tsg101 and HIV p6gag, while the p6/E6G mutation outside the PTAP motif did not result in the elimination of the Tsg101-p6gag interaction.

[0128] The interactions between TSG101 and wild-type p6gag (WT) or the p6gag PTAP mutants were further quantitated by performing liquid culture β-galactosidase assays. Cultures were grown overnight in synthetic media (-Leu, -Trp, +glucose) in 96 well plates, normalized for optical density, and lysed by addition of 6× lysis/substrate solution in 6×Z-buffer (60 mM KCl, 6 mM MgSO₄, 360 mM Na₂HPO₄, 240 mM NaH₂PO₄, 6 mg/ml CPRG, 0.12 U/ml lyticase, 0.075% NP-40). Cultures were incubated for 2 hr at 37° C., clarified by centrifugation, and the optical absorbance of each supernatant was measured (575 nm). Full length Tsg101 bound wild-type p6 in the two-hybrid liquid culture assay, resulting in high levels of β-galactosidase activity (>300-fold over background). Three different p6 point mutants were used to test whether the Tsg101 binding interaction required the PTAP late domain motif within HIV-1 p6, and all three (P6L, A9R and P10L) reduced β-galactosidase activity to background levels. Each of these point mutations also arrests HIV-1 budding at a late stage (Huang et al. 1995). These results are consistent with the hypothesis that the interaction between HIV p6gag and the human cellular protein TSG101 is essential for viral budding to occur.

### Example 2

[0129] A fusion protein with a GST tag fused to the HIV-1 GAGp6 domain was recombinantly expressed and purified by chromatography. In addition, a GAGp6 peptide containing the first 14 amino acid residues (“p6(1-14)”) was synthesized chemically by standard peptide synthesis methods. The peptide was purified by conventional protein purification techniques, e.g., by chromatography.

[0130] Nunc/Nalgene Maxisorp plates were incubated overnight at 4° C. or for 1-2 hrs at room temperature in 100 μl of a protein coupling solution containing purified GST-p6 and 50 mM Carbonate, pH=9.6. This allowed the attachment of the GST-p6 fusion protein to the plates. Liquids in the plates were then emptied and wells filled with 400 μl/well of a blocking buffer (SuperBlock; Pierce-Endogen, Rockford, Ill.). After incubating for 1 hour at room temperature, 100 μl of a mixture containing Drosophila S2 cell lysate myc-tagged Tsg101 (residues 1-207) and a specific amount of the p6(1-14) peptide were applied to the wells of the plate. This mixture was allowed to react for 2 hours at room temperature to form p6:Tsg101 protein-protein complexes.

[0131] Plates were then washed 4×100 μl with 1×PBST solution (Invitrogen; Carlsbad, Calif.). After washing, 100 μl of 1 μg/ml solution of anti-myc monoclonal antibody (Clone 9E10; Roche Molecular Biochemicals; Indianapolis, Ind.) in 1×PBST was added to the wells of the plate to detect the myc-epitope tag on the Tsg101 protein. Plates were then washed again with 4×100 μl with 1×PBST solution and 100 μl of 1 μg/ml solution of horseradish peroxidase (HRP) conjugated Goat anti-mouse IgG (Jackson Immunoresearch Labs; West Grove, Pa.) in 1×PBST was added to the wells of the plate to detect bound mouse anti-myc antibodies. Plates were then washed again with 4×100 μl with 1×PBST solution and 100 μl of fluorescent substrate (QuantaBlu; Pierce-Endogen, Rockford, Ill.) was added to all wells. After 30 minutes, 100 μl of stop solution was added to each well to inhibit the function of HRP. Plates were then read on a Packard Fusion instrument at an excitation wavelength of 325 nm and an emission wavelength of 420 nm. The presence of fluorescent signals indicates binding of Tsg101 to the fixed GST-p6. In contrast, the absence of fluorescent signals indicates that the p6(1-14) peptide is capable of disrupting the interaction between Tsg101 and HIV p6.

[0132] Different concentrations of the p6(1-14) peptide were tested, and the relative intensities of the fluorescence signals obtained at different concentrations were plotted against the peptide concentrations. The competitive inhibition curve is shown in FIG. 1. Two Dixon plots are shown in FIG. 2 and FIG. 3, respectively.

### Example 3

### 1. Materials

[0133] For antiviral tests, the following peptidic compounds (in Table 3) were chemically synthesized and purified by conventional protein purification techniques:

TABLE 28

| Compound | Formula | SEQ ID NO: |
|---|---|---|
| MPI-PEP1 | NH₂-(R)₉-PEPTAPEE-COOH | 3485 |
| MPI-PEP2 | NH₂-(R)₉-PEPTALEE-COOH | 3486 |
| MPI-PEP3 | NH₂-RPEPTAP-CO-NH₂ | 3487 |

[0134] The compounds were solubilized in sterile RPMI 1640 tissue culture medium to yield 40 mM stock solutions. AZT was used as a positive control antiviral compound.

[0135] Fresh human blood was obtained commercially from Interstate Blood Bank, Inc. (Memphis, Tenn.). The lymphotropic clinical isolate HIV-1_{ROJO} was obtained from a pediatric patient attending the AIDS Clinic at the University of Alabama at Birmingham. The laboratory-adapted HIV-1_{IIIB} strain was propagated and tittered in fresh human PBMCs; pre-titered aliquots of HIV-1_{ROJO} and Hiv-1_{IIIB} were removed from the freezer (−80° C.) and thawed rapidly to room temperature in a biological safety cabinet immediately before use. Phytohemagglutinin (PHA-P) was obtained from Sigma (St. Louis, Mo.) and recombinant IL-2 was obtained from Amgen (San Francisco, Calif.).

### 2. Anti-HIV Efficacy Evaluation in Fresh Human PBMCs

[0136] Fresh human PBMCs were isolated from screened donors, seronegative for HIV and HBV. Leukophoresed blood was diluted 1:1 with Dulbecco's phosphate buffered saline (PBS), layered over 14 mL of Ficoll-Hypaque density gradient in a 50 mL centrifuge tube and then centrifuged for 30 minutes at 600×g. Banded PBMCs were aspirated from the resulting interface and subsequently washed 2× with PBS by low speed centrifugation. After the final wash, cells were enumerated by trypan blue exclusion and re-suspended at 1×10⁷ cells/mL in RPMI 1640 supplemented with 15% Fetal Bovine Serum (FBS), 2 mM L-glutamine, 4 μg/mL PHA-P. The cells were allowed to incubate for 48-72 hours at 37° C. After incubation, PBMCs were centrifuged and reset in RPMI 1640 with 15% FBS, 2 mM L-glutamine, 100 U/ml penicillin, 100 μg/mL streptomycin, 10 μg/mL gentamycin, and 20 U/mL recombinant human IL-2. PBMCs were maintained in this medium at a concentration of 1-2×10⁶ cells/mL with biweekly medium changes until used in the assay protocol.

[0137] For the standard PBMC assay, PHA-P stimulated cells from at least two normal donors were pooled, diluted in fresh medium to a final concentration of 1×10⁶ cells/mL, and plated in the interior wells of 96 well round bottom microplate at 50 μL/well (5×10⁴ cells/well). Test drug dilutions were prepared at a 2× concentration in microtiter tubes and 100 μL of each concentration was placed in appropriate wells in a standard format. 50 μl, of a predetermined dilution of virus stock was placed in each test well (final MOI≈0.1). Wells with cells and virus alone were used for virus control. Separate plates were prepared identically without virus for drug cytotoxicity studies using an XTT assay system. The PBMC cultures were maintained for seven days following infection, at which time cell-free supernate samples were collected and assayed for reverse transcriptase activity as described below.

### 3. Reverse Transcriptase Activity Assay

[0138] A microtiter based reverse transcriptase (RT) reaction was utilized. See Buckheit et al., AIDS Research and Human Retroviruses 7:295-302 (1991). Tritiated thymidine triphosphate (NEN) (TTP) was resuspended in distilled H₂O at 5 Ci/ml. Poly rA and oligo dT were prepared as a stock solution which was kept at −20° C. The RT reaction buffer was prepared fresh on a daily basis and consists of 125 μl 1M EGTA, 125 μl dH₂O, 110 μl 10% SDS, 50 μl 1M Tris (pH 7.4), 50 μl 1M DTT, and 40 μl 1M MgCL₂. These three solutions were mixed together in a ratio of 2 parts TTP, 1 part poly rA:oligo dT, and 1 part reaction buffer. Ten microliters of this reactions mixture was placed at a round bottom microtiter plate and 15 μl of virus containing supernatant was added and mixed. The plate was incubated at 37° C. in a water bath with a solid support to prevent submersion of the plate and incubated for 60 minutes. Following reaction, the reaction volume was spotted onto pieces of DE81 paper, washed 5 times 5 minutes each in a 5% sodium phosphate buffer, 2 times 1 minute each in distilled water, 2 times for 1 minute each in 70% ethanol, and then dried. Opti-Fluor-O (Packard) was added to each sample and incorporated radioactivity was quantified utilizing a Wallac 1450 MicroBeta Plus liquid scintillation counter.

### 4. Cytotoxicity Measurement by MTS Staining

[0139] At assay termination the assay plates were stained with the soluble tetrazolium-based dye MTS (CellTiter Reagent, Promega) to determine cell viability and quantify compound toxicity. MTS is metabolized by the mitochondria enzymes of metabolically active cells to yield a soluble formazan product, allowing the rapid quantitative analysis cell viability and compound cytotoxicity. The MTS is a stable solution that does not require preparation before use. At termination of the assay, 20 μl of MTS reagent was added per well. The wells were incubated overnight for the HIV cytoprotection assay at 37° C. The incubation intervals were chosen based on empirically determined times for optimal dye reduction in each cell type. Adhesive plate sealers were used in place of the lids, the sealed plate was inverted several times to mix the soluble formazan product and the plate was read spectrophotometrically at 490 nm with a Molecular Devices Vmax plate reader.

### 5. Data Analysis

[0140] Indices including % CPE Reduction, % Cell Viability, IC₅₀, TC₅₀, and others were calculated and summarized in Table 4 below. The graphical results for the three peptidic compounds tested are displayed in FIGS. 4, 5 and 6, respectively. AZT was evaluated in parallel as a relevant positive control compound in the anti-HIV assay, and the graphical result is shown in FIG. 7.

TABLE 29

| Compound | | | Therapeutic | |
|---|---|---|---|---|
| Name | IC₅₀ (μM) | TC₅₀ (μM) | Index | Comments |
| MPI-PEP1 | 21.7 | >200.0 | 9.2 | Active |
| MPI-PEP2 | >200.0 | >200.0 | N/A | Inactive |
| MPI-PEP3 | >200.0 | >200.0 | N/A | Inactive |
| AZT | 0.008 | >1.0 | >125.00 | Control; Highly |
| | | | | Active |

### Example 4

[0141] This demonstrates the efficacy assay for the anti-HBV effect of test compound, e.g., the compounds used in Example 3. The assay is similar to the assay described by Korba and Milman, Antiviral Res., 15:217-228 (1991) and Korba and Gerin, Antiviral Res., 19:55-70 (1992), with the exception that viral DNA detection and quantification is dramatically simplified. Briefly, HepG2-2.2.15 cells are plated in 96-well microtiter plates at an initial density of 2×10⁴ cells/100 μl in DMEM medium supplemented with 10% fetal bovine serum. To promote cell adherence, the 96-well plates have been pre-coated with collagen prior to cell plating. After incubation at 37° C. in a humidified, 5% CO₂ environment for 16-24 hours, the confluent monolayer of HepG2-2.2.15 cells is washed and the medium is replaced with complete medium containing various concentrations of test compound. Every three days, the culture medium is replaced with fresh medium containing the appropriately diluted drug. Nine days following the initial administration of test compounds, the cell culture supernate is collected and clarified by centrifugation (Sorvall RT-6000D centrifuge, 1000 rpm for 5 min). Three microliters of clarified supernate is then subjected to real-time quantitative PCR using conditions described below.

[0142] Virion-associated HBV DNA present in the tissue culture supernate is PCR amplified using primers derived from HBV strain ayw. Subsequently, the PCR-amplified HBV DNA is detected in real-time (i.e., at each PCR thermocycle step) by monitoring increases in fluorescence signals that result from exonucleolytic degradation of a quenched fluorescent probe molecule following hybridization of the probe to the amplified HBV DNA. The probe molecule, designed with the aid of Primer Express™ (PE-Applied Biosystems) software, is complementary to DNA sequences present in the HBV DNA region amplified.

[0143] Routinely, 3 μl of clarified supernate is analyzed directly (without DNA extraction) in a 50 μl PCR reaction. Reagents and conditions used are per the manufacturers suggestions (PE-Applied Biosystems). For each PCR amplification, a standard curve is simultaneously generated several log dilutions of a purified 1.2 kbp HBVayw subgenomic fragment; routinely, the standard curve ranged from 1×10⁶ to 1×10¹ nominal copy equivalents per PCR reaction.

[0144] All publications and patent applications mentioned in the specification are indicative of the level of those skilled in the art to which this invention pertains. All publications and patent applications are herein incorporated by reference to the same extent as if each individual publication or patent application was specifically and individually indicated to be incorporated by reference.

[0145] Although the foregoing invention has been described in some detail by way of illustration and example for purposes of clarity of understanding, it will be obvious that certain changes and modifications may be practiced within the scope of the appended claims.

TABLE 2
P(T/S)AP Motif Containing Peptides from
Ebola Virus Matrix Protein
(GenBank Accession No. AAL25816)

| | |
|---|---|
| SEQ ID NO: 38 | RVILPTAP |
| SEQ ID NO: 39 | VILPTAPP |
| SEQ ID NO: 40 | ILPTAPPE |
| SEQ ID NO: 41 | LPTAPPEY |
| SEQ ID NO: 42 | PTAPPEYM |
| SEQ ID NO: 43 | RRVILPTAP |
| SEQ ID NO: 44 | RVILPTAPP |
| SEQ ID NO: 45 | VILPTAPPE |
| SEQ ID NO: 46 | ILPTAPPEY |
| SEQ ID NO: 47 | LPTAPPEYM |
| SEQ ID NO: 48 | PTAPPEYME |
| SEQ ID NO: 49 | MRRVILPTAP |
| SEQ ID NO: 50 | RRVILPTAPP |
| SEQ ID NO: 51 | RVILPTAPPE |
| SEQ ID NO: 52 | VILPTAPPEY |
| SEQ ID NO: 53 | ILPTAPPEYM |
| SEQ ID NO: 54 | LPTAPPEYME |
| SEQ ID NO: 55 | PTAPPEYMEA |
| SEQ ID NO: 56 | MRRVILPTAPP |
| SEQ ID NO: 57 | RRVILPTAPPE |
| SEQ ID NO: 58 | RVILPTAPPEY |
| SEQ ID NO: 59 | VILPTAPPEYM |
| SEQ ID NO: 60 | ILPTAPPEYME |
| SEQ ID NO: 61 | LPTAPPEYMEA |
| SEQ ID NO: 62 | PTAPPEYMEAI |
| SEQ ID NO: 63 | MRRVILPTAPPE |
| SEQ ID NO: 64 | RRVILPTAPPEY |
| SEQ ID NO: 65 | RVILPTAPPEYM |
| SEQ ID NO: 66 | VILPTAPPEYME |
| SEQ ID NO: 67 | ILPTAPPEYMEA |
| SEQ ID NO: 68 | LPTAPPEYMEAI |
| SEQ ID NO: 69 | PTAPPEYMEAIY |
| SEQ ID NO: 70 | MRRVILPTAPPEY |
| SEQ ID NO: 71 | RRVILPTAPPEYM |
| SEQ ID NO: 72 | RVILPTAPPEYME |
| SEQ ID NO: 73 | VILPTAPPEYMEA |
| SEQ ID NO: 74 | ILPTAPPEYMEAI |
| SEQ ID NO: 75 | LPTAPPEYMEAIY |
| SEQ ID NO: 76 | PTAPPEYMEAIYP |
| SEQ ID NO: 77 | MRRVILPTAPPEYM |
| SEQ ID NO: 78 | RRVILPTAPPEYME |
| SEQ ID NO: 79 | RVILPTAPPEYMEA |
| SEQ ID NO: 80 | VILPTAPPEYMEAI |
| SEQ ID NO: 81 | ILPTAPPEYMEAIY |
| SEQ ID NO: 82 | LPTAPPEYMEAIYP |
| SEQ ID NO: 83 | PTAPPEYMEAIYPV |
| SEQ ID NO: 84 | MRRVILPTAPPEYME |
| SEQ ID NO: 85 | RRVILPTAPPEYMEA |
| SEQ ID NO: 86 | RVILPTAPPEYMEAI |
| SEQ ID NO: 87 | VILPTAPPEYMEAIY |
| SEQ ID NO: 88 | ILPTAPPEYMEAIYP |
| SEQ ID NO: 89 | LPTAPPEYMEAIYPV |
| SEQ ID NO: 90 | PTAPPEYMEAIYPVR |
| SEQ ID NO: 91 | MRRVILPTAPPEYMEA |
| SEQ ID NO: 92 | RRVILPTAPPEYMEAI |
| SEQ ID NO: 93 | RVILPTAPPEYMEAIY |
| SEQ ID NO: 94 | VILPTAPPEYMEAIYP |
| SEQ ID NO: 95 | ILPTAPPEYMEAIYPV |
| SEQ ID NO: 96 | LPTAPPEYMEAIYPVR |
| SEQ ID NO: 97 | PTAPPEYMEAIYPVRS |
| SEQ ID NO: 98 | MRRVILPTAPPEYMEAI |
| SEQ ID NO: 99 | RRVILPTAPPEYMEAIY |
| SEQ ID NO: 100 | RVILPTAPPEYMEAIYP |
| SEQ ID NO: 101 | VILPTAPPEYMEAIYPV |
| SEQ ID NO: 102 | ILPTAPPEYMEAIYPVR |
| SEQ ID NO: 103 | LPTAPPEYMEAIYPVRS |
| SEQ ID NO: 104 | PTAPPEYMEAIYPVRSN |
| SEQ ID NO: 105 | MRRVILPTAPPEYMEAIY |
| SEQ ID NO: 106 | RRVILPTAPPEYMEAIYP |
| SEQ ID NO: 107 | RVILPTAPPEYMEAIYPV |
| SEQ ID NO: 108 | VILPTAPPEYMEAIYPVR |
| SEQ ID NO: 109 | ILPTAPPEYMEAIYPVRS |
| SEQ ID NO: 110 | LPTAPPEYMEAIYPVRSN |
| SEQ ID NO: 111 | PTAPPEYMEAIYPVRSNS |
| SEQ ID NO: 112 | MRRVILPTAPPEYMEAIYP |
| SEQ ID NO: 113 | RRVILPTAPPEYMEAIYPV |
| SEQ ID NO: 114 | RVILPTAPPEYMEAIYPVR |
| SEQ ID NO: 115 | VILPTAPPEYMEAIYPVRS |
| SEQ ID NO: 116 | ILPTAPPEYMEAIYPVRSN |
| SEQ ID NO: 117 | LPTAPPEYMEAIYPVRSNS |
| SEQ ID NO: 118 | PTAPPEYMEAIYPVRSNST |
| SEQ ID NO: 119 | MRRVILPTAPPEYMEAIYPVV |
| SEQ ID NO: 120 | RRVILPTAPPEYMEAIYPVR |
| SEQ ID NO: 121 | RVILPTAPPEYMEAIYPVRS |
| SEQ ID NO: 122 | VILPTAPPEYMEAIYPVRSN |
| SEQ ID NO: 123 | ILPTAPPEYMEAIYPVRSNS |
| SEQ ID NO: 124 | LPTAPPEYMEAIYPVRSNST |
| SEQ ID NO: 125 | PTAPPEYMEAIYPVRSNSTI |

TABLE 3
P(T/S)AP Motif Containing Peptides from
Hepatitis B Virus PreS1/PreS2/S Envelope Protein
(GenBank Accession No. BAA85340)

| | |
|---|---|
| SEQ ID NO: 126 | LTTVPTAP |
| SEQ ID NO: 127 | TTVPTAPP |
| SEQ ID NO: 128 | TVPTAPPP |
| SEQ ID NO: 129 | VPTAPPPA |
| SEQ ID NO: 130 | PTAPPPAS |
| SEQ ID NO: 131 | ILTTVPTAP |
| SEQ ID NO: 132 | LTTVPTAPP |
| SEQ ID NO: 133 | TTVPTAPPP |
| SEQ ID NO: 134 | TVPTAPPPA |
| SEQ ID NO: 135 | VPTAPPPAS |
| SEQ ID NO: 136 | PTAPPPAST |
| SEQ ID NO: 137 | GILTTVPTAP |
| SEQ ID NO: 138 | ILTTVPTAPP |
| SEQ ID NO: 139 | LTTVPTAPPP |
| SEQ ID NO: 140 | TTVPTAPPPA |
| SEQ ID NO: 141 | TVPTAPPPAS |
| SEQ ID NO: 142 | VPTAPPPAST |
| SEQ ID NO: 143 | PTAPPPASTN |
| SEQ ID NO: 144 | QGILTTVPTAP |
| SEQ ID NO: 145 | GILTTVPTAPP |
| SEQ ID NO: 146 | ILTTVPTAPPP |
| SEQ ID NO: 147 | LTTVPTAPPPA |
| SEQ ID NO: 148 | TTVPTAPPPAS |
| SEQ ID NO: 149 | TVPTAPPPAST |
| SEQ ID NO: 150 | VPTAPPPASTN |
| SEQ ID NO: 151 | PTAPPPASTNR |
| SEQ ID NO: 152 | AQGILTTVPTAP |
| SEQ ID NO: 153 | QGILTTVPTAPP |
| SEQ ID NO: 154 | GILTTVPTAPPP |
| SEQ ID NO: 155 | ILTTVPTAPPPA |
| SEQ ID NO: 156 | LTTVPTAPPPAS |
| SEQ ID NO: 157 | TTVPTAPPPAST |
| SEQ ID NO: 158 | TVPTAPPPASTN |
| SEQ ID NO: 159 | VPTAPPPASTNR |
| SEQ ID NO: 160 | PTAPPPASTNRQ |
| SEQ ID NO: 161 | QAQGILTTVPTAP |
| SEQ ID NO: 162 | AQGILTTVPTAPP |
| SEQ ID NO: 163 | QGILTTVPTAPPP |
| SEQ ID NO: 164 | GILTTVPTAPPPA |
| SEQ ID NO: 165 | ILTTVPTAPPPAS |
| SEQ ID NO: 166 | LTTVPTAPPPAST |
| SEQ ID NO: 167 | TTVPTAPPPASTN |
| SEQ ID NO: 168 | TVPTAPPPASTNR |
| SEQ ID NO: 169 | VPTAPPPASTNRQ |
| SEQ ID NO: 170 | PTAPPPASTNRQL |
| SEQ ID NO: 171 | PQAQGILTTVPTAP |
| SEQ ID NO: 172 | QAQGILTTVPTAPP |
| SEQ ID NO: 173 | AQGILTTVPTAPPP |
| SEQ ID NO: 174 | QGILTTVPTAPPPA |
| SEQ ID NO: 175 | GILTTVPTAPPPAS |
| SEQ ID NO: 176 | ILTTVPTAPPPAST |
| SEQ ID NO: 177 | LTTVPTAPPPASTN |
| SEQ ID NO: 178 | TTVPTAPPPASTNR |
| SEQ ID NO: 179 | TVPTAPPPASTNRQ |
| SEQ ID NO: 180 | VPTAPPPASTNRQL |
| SEQ ID NO: 181 | PTAPPPASTNRQLG |
| SEQ ID NO: 182 | SPQAQGILTTVPTAP |
| SEQ ID NO: 183 | PQAQGILTTVPTAPP |
| SEQ ID NO: 184 | QAQGILTTVPTAPPP |
| SEQ ID NO: 185 | AQGILTTVPTAPPPA |
| SEQ ID NO: 186 | QGILTTVPTAPPPAS |
| SEQ ID NO: 187 | GILTTVPTAPPPAST |
| SEQ ID NO: 188 | ILTTVPTAPPPASTN |
| SEQ ID NO: 189 | LTTVPTAPPPASTNR |
| SEQ ID NO: 190 | TTVPTAPPPASTNRQ |
| SEQ ID NO: 191 | TVPTAPPPASTNRQL |
| SEQ ID NO: 192 | VPTAPPPASTNRQLG |
| SEQ ID NO: 193 | PTAPPPASTNRQLGR |
| SEQ ID NO: 194 | WSPQAQGILTTVPTAP |
| SEQ ID NO: 195 | SPQAQGILTTVPTAPP |
| SEQ ID NO: 196 | PQAQGILTTVPTAPPP |
| SEQ ID NO: 197 | QAQGILTTVPTAPPPA |
| SEQ ID NO: 198 | AQGILTTVPTAPPPAS |
| SEQ ID NO: 199 | QGILTTVPTAPPPAST |
| SEQ ID NO: 200 | GILTTVPTAPPPASTN |
| SEQ ID NO: 201 | ILTTVPTAPPPASTNR |
| SEQ ID NO: 202 | LTTVPTAPPPASTNRQ |
| SEQ ID NO: 203 | TTVPTAPPPASTNRQL |
| SEQ ID NO: 204 | TVPTAPPPASTNRQLG |
| SEQ ID NO: 205 | VPTAPPPASTNRQLGR |
| SEQ ID NO: 206 | PTAPPPASTNRQLGRK |
| SEQ ID NO: 207 | GWSPQAQGILTTVPTAP |
| SEQ ID NO: 208 | WSPQAQGILTTVPTAPP |
| SEQ ID NO: 209 | SPQAQGILTTVPTAPPP |
| SEQ ID NO: 210 | PQAQGILTTVPTAPPPA |
| SEQ ID NO: 211 | QAQGILTTVPTAPPPAS |
| SEQ ID NO: 212 | AQGILTTVPTAPPPAST |
| SEQ ID NO: 213 | QGILTTVPTAPPPASTN |
| SEQ ID NO: 214 | GILTTVPTAPPPASTNR |
| SEQ ID NO: 215 | ILTTVPTAPPPASTNRQ |
| SEQ ID NO: 216 | LTTVPTAPPPASTNRQL |
| SEQ ID NO: 217 | TTVPTAPPPASTNRQLG |
| SEQ ID NO: 218 | TVPTAPPPASTNRQLGR |
| SEQ ID NO: 219 | VPTAPPPASTNRQLGRK |
| SEQ ID NO: 220 | PTAPPPASTNRQLGRKP |
| SEQ ID NO: 221 | LGWSPQAQGILTTVPTAP |
| SEQ ID NO: 222 | GWSPQAQGILTTVPTAPP |
| SEQ ID NO: 223 | WSPQAQGILTTVPTAPPP |
| SEQ ID NO: 224 | SPQAQGILTTVPTAPPPA |
| SEQ ID NO: 225 | PQAQGILTTVPTAPPPAS |
| SEQ ID NO: 226 | QAQGILTTVPTAPPPAST |
| SEQ ID NO: 227 | AQGILTTVPTAPPPASTN |
| SEQ ID NO: 228 | QGILTTVPTAPPPASTNR |
| SEQ ID NO: 229 | GILTTVPTAPPPASTNRQ |
| SEQ ID NO: 230 | ILTTVPTAPPPASTNRQL |
| SEQ ID NO: 231 | LTTVPTAPPPASTNRQLG |
| SEQ ID NO: 232 | TTVPTAPPPASTNRQLGR |
| SEQ ID NO: 233 | TVPTAPPPASTNRQLGRK |
| SEQ ID NO: 234 | VPTAPPPASTNRQLGRKP |
| SEQ ID NO: 235 | PTAPPPASTNRQLGRKPT |
| SEQ ID NO: 236 | LLGWSPQAQGILTTVPTAP |
| SEQ ID NO: 237 | LGWSPQAQGILTTVPTAPP |
| SEQ ID NO: 238 | GWSPQAQGILTTVPTAPPP |
| SEQ ID NO: 239 | WSPQAQGILTTVPTAPPPA |
| SEQ ID NO: 240 | SPQAQGILTTVPTAPPPAS |
| SEQ ID NO: 241 | PQAQGILTTVPTAPPPAST |
| SEQ ID NO: 242 | QAQGILTTVPTAPPPASTN |
| SEQ ID NO: 243 | AQGILTTVPTAPPPASTNR |
| SEQ ID NO: 244 | QGILTTVPTAPPPASTNRQ |
| SEQ ID NO: 245 | GILTTVPTAPPPASTNRQL |
| SEQ ID NO: 246 | ILTTVPTAPPPASTNRQLG |
| SEQ ID NO: 247 | LTTVPTAPPPASTNRQLGR |
| SEQ ID NO: 248 | TTVPTAPPPASTNRQLGRK |
| SEQ ID NO: 249 | TVPTAPPPASTNRQLGRKP |
| SEQ ID NO: 250 | VPTAPPPASTNRQLGRKPT |
| SEQ ID NO: 251 | PTAPPPASTNRQLGRKPTP |
| SEQ ID NO: 252 | GLLGWSPQAQGILTTVPTAP |
| SEQ ID NO: 253 | LLGWSPQAQGILTTVPTAPP |
| SEQ ID NO: 254 | LGWSPQAQGILTTVPTAPPP |
| SEQ ID NO: 255 | GWSPQAQGILTTVPTAPPPA |
| SEQ ID NO: 256 | WSPQAQGILTTVPTAPPPAS |
| SEQ ID NO: 257 | SPQAQGILTTVPTAPPPAST |
| SEQ ID NO: 258 | PQAQGILTTVPTAPPPASTN |
| SEQ ID NO: 259 | QAQGILTTVPTAPPPASTNR |
| SEQ ID NO: 260 | AQGILTTVPTAPPPASTNRQ |
| SEQ ID NO: 261 | QGILTTVPTAPPPASTNRQL |
| SEQ ID NO: 262 | GILTTVPTAPPPASTNRQLG |
| SEQ ID NO: 263 | ILTTVPTAPPPASTNRQLGR |
| SEQ ID NO: 264 | LTTVPTAPPPASTNRQLGRK |
| SEQ ID NO: 265 | TTVPTAPPPASTNRQLGRKP |
| SEQ ID NO: 266 | TVPTAPPPASTNRQLGRKPT |
| SEQ ID NO: 267 | VPTAPPPASTNRQLGRKPTP |
| SEQ ID NO: 268 | PTAPPPASTNRQLGRKPTPL |

TABLE 4
P(T/S)AP Motif Containing Peptides from
Human Herpesvirus 1 RL2 Protein
(GenBank Accession No. NP_044601)

| | |
|---|---|
| SEQ ID NO: 269 | RTAPPSAP |
| SEQ ID NO: 270 | TAPPSAPI |
| SEQ ID NO: 271 | APPSAPIG |
| SEQ ID NO: 272 | PPSAPIGP |
| SEQ ID NO: 273 | PSAPIGPH |
| SEQ ID NO: 274 | ARTAPPSAP |
| SEQ ID NO: 275 | RTAPPSAPI |
| SEQ ID NO: 276 | TAPPSAPIG |
| SEQ ID NO: 277 | APPSAPIGP |
| SEQ ID NO: 278 | PPSAPIGPH |
| SEQ ID NO: 279 | PSAPIGPHG |
| SEQ ID NO: 280 | AARTAPPSAP |
| SEQ ID NO: 281 | ARTAPPSAPI |
| SEQ ID NO: 282 | RTAPPSAPIG |
| SEQ ID NO: 283 | TAPPSAPIGP |
| SEQ ID NO: 284 | APPSAPIGPH |
| SEQ ID NO: 285 | PPSAPIGPHG |
| SEQ ID NO: 286 | PSAPIGPHGS |
| SEQ ID NO: 287 | AAARTAPPSAP |
| SEQ ID NO: 288 | AARTAPPSAPI |
| SEQ ID NO: 289 | ARTAPPSAPIG |
| SEQ ID NO: 290 | RTAPPSAPIGP |
| SEQ ID NO: 291 | TAPPSAPIGPH |
| SEQ ID NO: 292 | APPSAPIGPHG |
| SEQ ID NO: 293 | PPSAPIGPHGS |
| SEQ ID NO: 294 | PSAPIGPHGSS |
| SEQ ID NO: 295 | PAAARTAPPSAP |
| SEQ ID NO: 296 | AAARTAPPSAPI |
| SEQ ID NO: 297 | AARTAPPSAPIG |
| SEQ ID NO: 298 | ARTAPPSAPIGP |
| SEQ ID NO: 299 | RTAPPSAPIGPH |
| SEQ ID NO: 300 | TAPPSAPIGPHG |
| SEQ ID NO: 301 | APPSAPIGPHGS |
| SEQ ID NO: 302 | PPSAPIGPHGSS |
| SEQ ID NO: 303 | PSAPIGPHGSSN |
| SEQ ID NO: 304 | QPAAARTAPPSAP |
| SEQ ID NO: 305 | PAAARTAPPSAPI |
| SEQ ID NO: 306 | AAARTAPPSAPIG |
| SEQ ID NO: 307 | AARTAPPSAPIGP |
| SEQ ID NO: 308 | ARTAPPSAPIGPH |
| SEQ ID NO: 309 | RTAPPSAPIGPHG |
| SEQ ID NO: 310 | TAPPSAPIGPHGS |
| SEQ ID NO: 311 | APPSAPIGPHGSS |
| SEQ ID NO: 312 | PPSAPIGPHGSSN |
| SEQ ID NO: 313 | PSAPIGPHGSSNT |
| SEQ ID NO: 314 | PQPAAARTAPPSAP |
| SEQ ID NO: 315 | QPAAARTAPPSAPI |
| SEQ ID NO: 316 | PAAARTAPPSAPIG |
| SEQ ID NO: 317 | AAARTAPPSAPIGP |
| SEQ ID NO: 318 | AARTAPPSAPIGPH |
| SEQ ID NO: 319 | ARTAPPSAPIGPHG |
| SEQ ID NO: 320 | RTAPPSAPIGPHGS |
| SEQ ID NO: 321 | TAPPSAPIGPHGSS |
| SEQ ID NO: 322 | APPSAPIGPHGSSN |
| SEQ ID NO: 323 | PPSAPIGPHGSSNT |
| SEQ ID NO: 324 | PSAPIGPHGSSNTN |
| SEQ ID NO: 325 | APQPAAARTAPPSAP |
| SEQ ID NO: 326 | PQPAAARTAPPSAPI |
| SEQ ID NO: 327 | QPAAARTAPPSAPIG |
| SEQ ID NO: 328 | PAAARTAPPSAPIGP |
| SEQ ID NO: 329 | AAARTAPPSAPIGPH |
| SEQ ID NO: 330 | AARTAPPSAPIGPHG |
| SEQ ID NO: 331 | ARTAPPSAPIGPHGS |
| SEQ ID NO: 332 | RTAPPSAPIGPHGSS |
| SEQ ID NO: 333 | TAPPSAPIGPHGSSN |
| SEQ ID NO: 334 | APPSAPIGPHGSSNT |
| SEQ ID NO: 335 | PPSAPIGPHGSSNTN |
| SEQ ID NO: 336 | PSAPIGPHGSSNTNT |
| SEQ ID NO: 337 | AAPQPAAARTAPPSAP |
| SEQ ID NO: 338 | APQPAAARTAPPSAPI |
| SEQ ID NO: 339 | PQPAAARTAPPSAPIG |
| SEQ ID NO: 340 | QPAAARTAPPSAPIGP |
| SEQ ID NO: 341 | PAAARTAPPSAPIGPH |
| SEQ ID NO: 342 | AAARTAPPSAPIGPHG |
| SEQ ID NO: 343 | AARTAPPSAPIGPHGS |
| SEQ ID NO: 344 | ARTAPPSAPIGPHGSS |
| SEQ ID NO: 345 | RTAPPSAPIGPHGSSN |
| SEQ ID NO: 346 | TAPPSAPIGPHGSSNT |
| SEQ ID NO: 347 | APPSAPIGPHGSSNTN |
| SEQ ID NO: 348 | PPSAPIGPHGSSNTNT |
| SEQ ID NO: 349 | PSAPIGPHGSSNTNTT |
| SEQ ID NO: 350 | HAAPQPAAARTAPPSAP |
| SEQ ID NO: 351 | AAPQPAAARTAPPSAPI |
| SEQ ID NO: 352 | APQPAAARTAPPSAPIG |
| SEQ ID NO: 353 | PQPAAARTAPPSAPIGP |
| SEQ ID NO: 354 | QPAAARTAPPSAPIGPH |
| SEQ ID NO: 355 | PAAARTAPPSAPIGPHG |
| SEQ ID NO: 356 | AAARTAPPSAPIGPHGS |
| SEQ ID NO: 357 | AARTAPPSAPIGPHGSS |
| SEQ ID NO: 358 | ARTAPPSAPIGPHGSSN |
| SEQ ID NO: 359 | RTAPPSAPIGPHGSSNT |
| SEQ ID NO: 360 | TAPPSAPIGPHGSSNTN |
| SEQ ID NO: 361 | APPSAPIGPHGSSNTNT |
| SEQ ID NO: 362 | PPSAPIGPHGSSNTNTT |
| SEQ ID NO: 363 | PSAPIGPHGSSNTNTTT |
| SEQ ID NO: 364 | SHAAPQPAAARTAPPSAP |
| SEQ ID NO: 365 | HAAPQPAAARTAPPSAPI |
| SEQ ID NO: 366 | AAPQPAAARTAPPSAPIG |
| SEQ ID NO: 367 | APQPAAARTAPPSAPIGP |
| SEQ ID NO: 368 | PQPAAARTAPPSAPIGPH |
| SEQ ID NO: 369 | QPAAARTAPPSAPIGPHG |
| SEQ ID NO: 370 | PAAARTAPPSAPIGPHGS |
| SEQ ID NO: 371 | AAARTAPPSAPIGPHGSS |
| SEQ ID NO: 372 | AARTAPPSAPIGPHGSSN |
| SEQ ID NO: 373 | ARTAPPSAPIGPHGSSNT |
| SEQ ID NO: 374 | RTAPPSAPIGPHGSSNTN |
| SEQ ID NO: 375 | TAPPSAPIGPHGSSNTNT |
| SEQ ID NO: 376 | APPSAPIGPHGSSNTNTT |
| SEQ ID NO: 377 | PPSAPIGPHGSSNTNTTT |
| SEQ ID NO: 378 | PSAPIGPHGSSNTNTTTN |
| SEQ ID NO: 379 | ASHAAPQPAAARTAPPSAP |
| SEQ ID NO: 380 | SHAAPQPAAARTAPPSAPI |
| SEQ ID NO: 381 | HAAPQPAAARTAPPSAPIG |
| SEQ ID NO: 382 | AAPQPAAARTAPPSAPIGP |
| SEQ ID NO: 383 | APQPAAARTAPPSAPIGPH |
| SEQ ID NO: 384 | PQPAAARTAPPSAPIGPHG |
| SEQ ID NO: 385 | QPAAARTAPPSAPIGPHGS |
| SEQ ID NO: 386 | PAAARTAPPSAPIGPHGSS |
| SEQ ID NO: 387 | AAARTAPPSAPIGPHGSSN |
| SEQ ID NO: 388 | AARTAPPSAPIGPHGSSNT |
| SEQ ID NO: 389 | ARTAPPSAPIGPHGSSNTN |
| SEQ ID NO: 390 | RTAPPSAPIGPHGSSNTNT |
| SEQ ID NO: 391 | TAPPSAPIGPHGSSNTNTT |
| SEQ ID NO: 392 | APPSAPIGPHGSSNTNTTT |
| SEQ ID NO: 393 | PPSAPIGPHGSSNTNTTTN |
| SEQ ID NO: 394 | PSAPIGPHGSSNTNTTTNS |
| SEQ ID NO: 395 | GASHAAPQPAAARTAPPSAP |
| SEQ ID NO: 396 | ASHAAPQPAAARTAPPSAPI |
| SEQ ID NO: 397 | SHAAPQPAAARTAPPSAPIG |
| SEQ ID NO: 398 | HAAPQPAAARTAPPSAPIGP |
| SEQ ID NO: 399 | AAPQPAAARTAPPSAPIGPH |
| SEQ ID NO: 400 | APQPAAARTAPPSAPIGPHG |
| SEQ ID NO: 401 | PQPAAARTAPPSAPIGPHGS |
| SEQ ID NO: 402 | QPAAARTAPPSAPIGPHGSS |
| SEQ ID NO: 403 | PAAARTAPPSAPIGPHGSSN |
| SEQ ID NO: 404 | AAARTAPPSAPIGPHGSSNT |
| SEQ ID NO: 405 | AARTAPPSAPIGPHGSSNTN |
| SEQ ID NO: 406 | ARTAPPSAPIGPHGSSNTNT |
| SEQ ID NO: 407 | RTAPPSAPIGPHGSSNTNTT |
| SEQ ID NO: 408 | TAPPSAPIGPHGSSNTNTTT |
| SEQ ID NO: 409 | APPSAPIGPHGSSNTNTTTN |
| SEQ ID NO: 410 | PPSAPIGPHGSSNTNTTTNS |
| SEQ ID NO: 411 | PSAPIGPHGSSNTNTTTNSS |
| SEQ ID NO: 412 | PPEYPTAP |
| SEQ ID NO: 413 | PEYPTAPA |
| SEQ ID NO: 414 | EYPTAPAS |
| SEQ ID NO: 415 | YPTAPASE |
| SEQ ID NO: 416 | PTAPASEW |
| SEQ ID NO: 417 | MPPEYPTAP |
| SEQ ID NO: 418 | PPEYPTAPA |
| SEQ ID NO: 419 | PEYPTAPAS |
| SEQ ID NO: 420 | EYPTAPASE |
| SEQ ID NO: 421 | YPTAPASEW |
| SEQ ID NO: 422 | PTAPASEWN |
| SEQ ID NO: 423 | VMPPEYPTAP |
| SEQ ID NO: 424 | MPPEYPTAPA |
| SEQ ID NO: 425 | PPEYPTAPAS |
| SEQ ID NO: 426 | PEYPTAPASE |
| SEQ ID NO: 427 | EYPTAPASEW |
| SEQ ID NO: 428 | YPTAPASEWN |
| SEQ ID NO: 429 | PTAPASEWNS |
| SEQ ID NO: 430 | HVMPPEYPTAP |
| SEQ ID NO: 431 | VMPPEYPTAPA |
| SEQ ID NO: 432 | MPPEYPTAPAS |
| SEQ ID NO: 433 | PPEYPTAPASE |
| SEQ ID NO: 434 | PEYPTAPASEW |
| SEQ ID NO: 435 | EYPTAPASEWN |
| SEQ ID NO: 436 | YPTAPASEWNS |
| SEQ ID NO: 437 | PTAPASEWNSL |
| SEQ ID NO: 438 | NHVMPPEYPTAP |
| SEQ ID NO: 439 | HVMPPEYPTAPA |
| SEQ ID NO: 440 | VMPPEYPTAPAS |
| SEQ ID NO: 441 | MPPEYPTAPASE |
| SEQ ID NO: 442 | PPEYPTAPASEW |
| SEQ ID NO: 443 | PEYPTAPASEWN |
| SEQ ID NO: 444 | EYPTAPASEWNS |
| SEQ ID NO: 445 | YPTAPASEWNSL |
| SEQ ID NO: 446 | PTAPASEWNSLW |
| SEQ ID NO: 447 | GNHVMPPEYPTAP |
| SEQ ID NO: 448 | NHVMPPEYPTAPA |
| SEQ ID NO: 449 | HVMPPEYPTAPAS |
| SEQ ID NO: 450 | VMPPEYPTAPASE |
| SEQ ID NO: 451 | MPPEYPTAPASEW |
| SEQ ID NO: 452 | PPEYPTAPASEWN |
| SEQ ID NO: 453 | PEYPTAPASEWNS |
| SEQ ID NO: 454 | EYPTAPASEWNSL |
| SEQ ID NO: 455 | YPTAPASEWNSLW |
| SEQ ID NO: 456 | PTAPASEWNSLWM |
| SEQ ID NO: 457 | AGNHVMPPEYPTAP |
| SEQ ID NO: 458 | GNHVMPPEYPTAPA |
| SEQ ID NO: 459 | NHVMPPEYPTAPAS |
| SEQ ID NO: 460 | HVMPPEYPTAPASE |
| SEQ ID NO: 461 | VMPPEYPTAPASEW |
| SEQ ID NO: 462 | MPPEYPTAPASEWN |
| SEQ ID NO: 463 | PPEYPTAPASEWNS |
| SEQ ID NO: 464 | PEYPTAPASEWNSL |
| SEQ ID NO: 465 | EYPTAPASEWNSLW |
| SEQ ID NO: 466 | YPTAPASEWNSLWM |
| SEQ ID NO: 467 | PTAPASEWNSLWMT |
| SEQ ID NO: 468 | TAGNHVMPPEYPTAP |
| SEQ ID NO: 469 | AGNHVMPPEYPTAPA |
| SEQ ID NO: 470 | GNHVMPPEYPTAPAS |
| SEQ ID NO: 471 | NHVMPPEYPTAPASE |
| SEQ ID NO: 472 | HVMPPEYPTAPASEW |
| SEQ ID NO: 473 | VMPPEYPTAPASEWN |
| SEQ ID NO: 474 | MPPEYPTAPASEWNS |
| SEQ ID NO: 475 | PPEYPTAPASEWNSL |
| SEQ ID NO: 476 | PEYPTAPASEWNSLW |
| SEQ ID NO: 477 | EYPTAPASEWNSLWM |
| SEQ ID NO: 478 | YPTAPASEWNSLWMT |
| SEQ ID NO: 479 | PTAPASEWNSLWMTP |
| SEQ ID NO: 480 | ETAGNHVMPPEYPTAP |
| SEQ ID NO: 481 | TAGNHVMPPEYPTAPA |
| SEQ ID NO: 482 | AGNHVMPPEYPTAPAS |
| SEQ ID NO: 483 | GNHVMPPEYPTAPASE |
| SEQ ID NO: 484 | NHVMPPEYPTAPASEW |
| SEQ ID NO: 485 | HVMPPEYPTAPASEWN |
| SEQ ID NO: 486 | VMPPEYPTAPASEWNS |
| SEQ ID NO: 487 | MPPEYPTAPASEWNSL |
| SEQ ID NO: 488 | PPEYPTAPASEWNSLW |
| SEQ ID NO: 489 | PEYPTAPASEWNSLWM |
| SEQ ID NO: 490 | EYPTAPASEWNSLWMT |
| SEQ ID NO: 491 | YPTAPASEWNSLWMTP |
| SEQ ID NO: 492 | PTAPASEWNSLWMTPV |
| SEQ ID NO: 493 | PETAGNHVMPPEYPTAP |
| SEQ ID NO: 494 | ETAGNHVMPPEYPTAPA |
| SEQ ID NO: 495 | TAGNHVMPPEYPTAPAS |
| SEQ ID NO: 496 | AGNHVMPPEYPTAPASE |
| SEQ ID NO: 497 | GNHVMPPEYPTAPASEW |
| SEQ ID NO: 498 | NHVMPPEYPTAPASEWN |
| SEQ ID NO: 499 | HVMPPEYPTAPASEWNS |
| SEQ ID NO: 500 | VMPPEYPTAPASEWNSL |
| SEQ ID NO: 501 | MPPEYPTAPASEWNSLW |
| SEQ ID NO: 502 | PPEYPTAPASEWNSLWM |
| SEQ ID NO: 503 | PEYPTAPASEWNSLWMT |
| SEQ ID NO: 504 | EYPTAPASEWNSLWMTP |
| SEQ ID NO: 505 | YPTAPASEWNSLWMTPV |
| SEQ ID NO: 506 | PTAPASEWNSLWMTPVG |
| SEQ ID NO: 507 | LPETAGNHVMPPEYPTAP |
| SEQ ID NO: 508 | PETAGNHVMPPEYPTAPA |
| SEQ ID NO: 509 | ETAGNHVMPPEYPTAPAS |
| SEQ ID NO: 510 | TAGNHVMPPEYPTAPASE |
| SEQ ID NO: 511 | AGNHVMPPEYPTAPASEW |
| SEQ ID NO: 512 | GNHVMPPEYPTAPASEWN |
| SEQ ID NO: 513 | NHVMPPEYPTAPASEWNS |
| SEQ ID NO: 514 | HVMPPEYPTAPASEWNSL |
| SEQ ID NO: 515 | VMPPEYPTAPASEWNSLW |
| SEQ ID NO: 516 | MPPEYPTAPASEWNSLWM |
| SEQ ID NO: 517 | PPEYPTAPASEWNSLWMT |
| SEQ ID NO: 518 | PEYPTAPASEWNSLWMTP |
| SEQ ID NO: 519 | EYPTAPASEWNSLWMTPV |
| SEQ ID NO: 520 | YPTAPASEWNSLWMTPVG |
| SEQ ID NO: 521 | PTAPASEWNSLWMTPVGN |
| SEQ ID NO: 522 | LLPETAGNHVMPPEYPTAP |
| SEQ ID NO: 523 | LPETAGNHVMPPEYPTAPA |
| SEQ ID NO: 524 | PETAGNHVMPPEYPTAPAS |
| SEQ ID NO: 525 | ETAGNHVMPPEYPTAPASE |
| SEQ ID NO: 526 | TAGNHVMPPEYPTAPASEW |
| SEQ ID NO: 527 | AGNHVMPPEYPTAPASEWN |
| SEQ ID NO: 528 | GNHVMPPEYPTAPASEWNS |
| SEQ ID NO: 529 | NHVMPPEYPTAPASEWNSL |
| SEQ ID NO: 530 | HVMPPEYPTAPASEWNSLW |
| SEQ ID NO: 531 | VMPPEYPTAPASEWNSLWM |
| SEQ ID NO: 532 | MPPEYPTAPASEWNSLWMT |
| SEQ ID NO: 533 | PPEYPTAPASEWNSLWMTP |
| SEQ ID NO: 534 | PEYPTAPASEWNSLWMTPV |
| SEQ ID NO: 535 | EYPTAPASEWNSLWMTPVG |
| SEQ ID NO: 536 | YPTAPASEWNSLWMTPVGN |
| SEQ ID NO: 537 | PTAPASEWNSLWMTPVGNM |
| SEQ ID NO: 538 | TLLPETAGNHVMPPEYPTAP |
| SEQ ID NO: 539 | LLPETAGNHVMPPEYPTAPA |
| SEQ ID NO: 540 | LPETAGNHVMPPEYPTAPAS |
| SEQ ID NO: 541 | PETAGNHVMPPEYPTAPASE |
| SEQ ID NO: 542 | ETAGNHVMPPEYPTAPASEW |
| SEQ ID NO: 543 | TAGNHVMPPEYPTAPASEWN |
| SEQ ID NO: 544 | AGNHVMPPEYPTAPASEWNS |
| SEQ ID NO: 545 | GNHVMPPEYPTAPASEWNSL |
| SEQ ID NO: 546 | NHVMPPEYPTAPASEWNSLW |
| SEQ ID NO: 547 | HVMPPEYPTAPASEWNSLWM |
| SEQ ID NO: 548 | VMPPEYPTAPASEWNSLWMT |
| SEQ ID NO: 549 | MPPEYPTAPASEWNSLWMTP |
| SEQ ID NO: 550 | PPEYPTAPASEWNSLWMTPV |
| SEQ ID NO: 551 | PEYPTAPASEWNSLWMTPVG |
| SEQ ID NO: 552 | EYPTAPASEWNSLWMTPVGN |
| SEQ ID NO: 553 | YPTAPASEWNSLWMTPVGNM |
| SEQ ID NO: 554 | PTAPASEWNSLWMTPVGNML |
| SEQ ID NO: 555 | FLGPPTAP |
| SEQ ID NO: 556 | LGPPTAPP |
| SEQ ID NO: 557 | GPPTAPPG |
| SEQ ID NO: 558 | PPTAPPGG |
| SEQ ID NO: 559 | PTAPPGGA |
| SEQ ID NO: 560 | LFLGPPTAP |
| SEQ ID NO: 561 | FLGPPTAPP |
| SEQ ID NO: 562 | LGPPTAPPG |
| SEQ ID NO: 563 | GPPTAPPGG |
| SEQ ID NO: 564 | PPTAPPGGA |
| SEQ ID NO: 565 | PTAPPGGAW |
| SEQ ID NO: 566 | LLFLGPPTAP |
| SEQ ID NO: 567 | LFLGPPTAPP |
| SEQ ID NO: 568 | FLGPPTAPPG |
| SEQ ID NO: 569 | LGPPTAPPGG |
| SEQ ID NO: 570 | GPPTAPPGGA |
| SEQ ID NO: 571 | PPTAPPGGAW |
| SEQ ID NO: 572 | PTAPPGGAWT |
| SEQ ID NO: 573 | TLLFLGPPTAP |
| SEQ ID NO: 574 | LLFLGPPTAPP |
| SEQ ID NO: 575 | LFLGPPTAPPG |
| SEQ ID NO: 576 | FLGPPTAPPGG |
| SEQ ID NO: 577 | LGPPTAPPGGA |
| SEQ ID NO: 578 | GPPTAPPGGAW |
| SEQ ID NO: 579 | PPTAPPGGAWT |
| SEQ ID NO: 580 | PTAPPGGAWTP |
| SEQ ID NO: 581 | QTLLFLGPPTAP |
| SEQ ID NO: 582 | TLLFLGPPTAPP |
| SEQ ID NO: 583 | LLFLGPPTAPPG |
| SEQ ID NO: 584 | LFLGPPTAPPGG |
| SEQ ID NO: 585 | FLGPPTAPPGGA |
| SEQ ID NO: 586 | LGPPTAPPGGAW |
| SEQ ID NO: 587 | GPPTAPPGGAWT |
| SEQ ID NO: 588 | PPTAPPGGAWTP |
| SEQ ID NO: 589 | PTAPPGGAWTPH |
| SEQ ID NO: 590 | NQTLLFLGPPTAP |
| SEQ ID NO: 591 | QTLLFLGPPTAPP |
| SEQ ID NO: 592 | TLLFLGPPTAPPG |
| SEQ ID NO: 593 | LLFLGPPTAPPGG |
| SEQ ID NO: 594 | LFLGPPTAPPGGA |
| SEQ ID NO: 595 | FLGPPTAPPGGAW |
| SEQ ID NO: 596 | LGPPTAPPGGAWT |
| SEQ ID NO: 597 | GPPTAPPGGAWTP |
| SEQ ID NO: 598 | PPTAPPGGAWTPH |
| SEQ ID NO: 599 | PTAPPGGAWTPHA |
| SEQ ID NO: 600 | INQTLLFLGPPTAP |
| SEQ ID NO: 601 | NQTLLFLGPPTAPP |
| SEQ ID NO: 602 | QTLLFLGPPTAPPG |
| SEQ ID NO: 603 | TLLFLGPPTAPPGG |
| SEQ ID NO: 604 | LLFLGPPTAPPGGA |
| SEQ ID NO: 605 | LFLGPPTAPPGGAW |
| SEQ ID NO: 606 | FLGPPTAPPGGAWT |
| SEQ ID NO: 607 | LGPPTAPPGGAWTP |
| SEQ ID NO: 608 | GPPTAPPGGAWTPH |
| SEQ ID NO: 609 | PPTAPPGGAWTPHA |
| SEQ ID NO: 610 | PTAPPGGAWTPHAR |
| SEQ ID NO: 611 | KINQTLLFLGPPTAP |
| SEQ ID NO: 612 | INQTLLFLGPPTAPP |
| SEQ ID NO: 613 | NQTLLFLGPPTAPPG |
| SEQ ID NO: 614 | QTLLFLGPPTAPPGG |
| SEQ ID NO: 615 | TLLFLGPPTAPPGGA |
| SEQ ID NO: 616 | LLFLGPPTAPPGGAW |
| SEQ ID NO: 617 | LFLGPPTAPPGGAWT |
| SEQ ID NO: 618 | FLGPPTAPPGGAWTP |
| SEQ ID NO: 619 | LGPPTAPPGGAWTPH |
| SEQ ID NO: 620 | GPPTAPPGGAWTPHA |
| SEQ ID NO: 621 | PPTAPPGGAWTPHAR |
| SEQ ID NO: 622 | PTAPPGGAWTPHARV |
| SEQ ID NO: 623 | MKINQTLLFLGPPTAP |
| SEQ ID NO: 624 | KINQTLLFLGPPTAPP |
| SEQ ID NO: 625 | INQTLLFLGPPTAPPG |
| SEQ ID NO: 626 | NQTLLFLGPPTAPPGG |
| SEQ ID NO: 627 | QTLLFLGPPTAPPGGA |
| SEQ ID NO: 628 | TLLFLGPPTAPPGGAW |
| SEQ ID NO: 629 | LLFLGPPTAPPGGAWT |
| SEQ ID NO: 630 | LFLGPPTAPPGGAWTP |
| SEQ ID NO: 631 | FLGPPTAPPGGAWTPH |
| SEQ ID NO: 632 | LGPPTAPPGGAWTPHA |
| SEQ ID NO: 633 | GPPTAPPGGAWTPHAR |
| SEQ ID NO: 634 | PPTAPPGGAWTPHARV |
| SEQ ID NO: 635 | PTAPPGGAWTPHARVC |
| SEQ ID NO: 636 | WMKINQTLLFLGPPTAP |
| SEQ ID NO: 637 | MKINQTLLFLGPPTAPP |
| SEQ ID NO: 638 | KINQTLLFLGPPTAPPG |
| SEQ ID NO: 639 | INQTLLFLGPPTAPPGG |
| SEQ ID NO: 640 | NQTLLFLGPPTAPPGGA |
| SEQ ID NO: 641 | QTLLFLGPPTAPPGGAW |
| SEQ ID NO: 642 | TLLFLGPPTAPPGGAWT |
| SEQ ID NO: 643 | LLFLGPPTAPPGGAWTP |
| SEQ ID NO: 644 | LFLGPPTAPPGGAWTPH |
| SEQ ID NO: 645 | FLGPPTAPPGGAWTPHA |
| SEQ ID NO: 646 | LGPPTAPPGGAWTPHAR |
| SEQ ID NO: 647 | GPPTAPPGGAWTPHARV |
| SEQ ID NO: 648 | PPTAPPGGAWTPHARVC |
| SEQ ID NO: 649 | PTAPPGGAWTPHARVCY |
| SEQ ID NO: 650 | VWMKINQTLLFLGPPTAP |
| SEQ ID NO: 651 | WMKINQTLLFLGPPTAPP |
| SEQ ID NO: 652 | MKINQTLLFLGPPTAPPG |
| SEQ ID NO: 653 | KINQTLLFLGPPTAPPGG |
| SEQ ID NO: 654 | INQTLLFLGPPTAPPGGA |
| SEQ ID NO: 655 | NQTLLFLGPPTAPPGGAW |
| SEQ ID NO: 656 | QTLLFLGPPTAPPGGAWT |
| SEQ ID NO: 657 | TLLFLGPPTAPPGGAWTP |
| SEQ ID NO: 658 | LLFLGPPTAPPGGAWTPH |
| SEQ ID NO: 659 | LFLGPPTAPPGGAWTPHA |
| SEQ ID NO: 660 | FLGPPTAPPGGAWTPHAR |
| SEQ ID NO: 661 | LGPPTAPPGGAWTPHARV |
| SEQ ID NO: 662 | GPPTAPPGGAWTPHARVC |
| SEQ ID NO: 663 | PPTAPPGGAWTPHARVCY |
| SEQ ID NO: 664 | PTAPPGGAWTPHARVCYA |
| SEQ ID NO: 665 | LVWMKINQTLLFLGPPTAP |
| SEQ ID NO: 666 | VWMKINQTLLFLGPPTAPP |
| SEQ ID NO: 667 | WMKINQTLLFLGPPTAPPG |
| SEQ ID NO: 668 | MKINQTLLFLGPPTAPPGG |
| SEQ ID NO: 669 | KINQTLLFLGPPTAPPGGA |
| SEQ ID NO: 670 | INQTLLFLGPPTAPPGGAW |
| SEQ ID NO: 671 | NQTLLFLGPPTAPPGGAWT |
| SEQ ID NO: 672 | QTLLFLGPPTAPPGGAWTP |
| SEQ ID NO: 673 | TLLFLGPPTAPPGGAWTPH |
| SEQ ID NO: 674 | LLFLGPPTAPPGGAWTPHA |
| SEQ ID NO: 675 | LFLGPPTAPPGGAWTPHAR |
| SEQ ID NO: 676 | FLGPPTAPPGGAWTPHARV |
| SEQ ID NO: 677 | LGPPTAPPGGAWTPHARVC |
| SEQ ID NO: 678 | GPPTAPPGGAWTPHARVCY |
| SEQ ID NO: 679 | PPTAPPGGAWTPHARVCYA |
| SEQ ID NO: 680 | PTAPPGGAWTPHARVCYAN |
| SEQ ID NO: 681 | ALVWMKINQTLLFLGPPTAP |
| SEQ ID NO: 682 | LVWMKINQTLLFLGPPTAPP |
| SEQ ID NO: 683 | VWMKINQTLLFLGPPTAPPG |
| SEQ ID NO: 684 | WMKINQTLLFLGPPTAPPGG |
| SEQ ID NO: 685 | MKINQTLLFLGPPTAPPGGA |
| SEQ ID NO: 686 | KINQTLLFLGPPTAPPGGAW |
| SEQ ID NO: 687 | INQTLLFLGPPTAPPGGAWT |
| SEQ ID NO: 688 | NQTLLFLGPPTAPPGGAWTP |
| SEQ ID NO: 689 | QTLLFLGPPTAPPGGAWTPH |
| SEQ ID NO: 690 | TLLFLGPPTAPPGGAWTPHA |
| SEQ ID NO: 691 | LLFLGPPTAPPGGAWTPHAR |
| SEQ ID NO: 692 | LFLGPPTAPPGGAWTPHARV |
| SEQ ID NO: 693 | FLGPPTAPPGGAWTPHARVC |
| SEQ ID NO: 694 | LGPPTAPPGGAWTPHARVCY |
| SEQ ID NO: 695 | GPPTAPPGGAWTPHARVCYA |
| SEQ ID NO: 696 | PPTAPPGGAWTPHARVCYAN |
| SEQ ID NO: 697 | PTAPPGGAWTPHARVCYANI |

TABLE 5
P(T/S)AP Motif Containing Peptides from Human
Herpesvirus 2 Virion Glycoprotein K
(GenBank Accession No. NP_044524)

| | |
|---|---|
| SEQ ID NO: 555 | FLGPPTAP |
| SEQ ID NO: 556 | LGPPTAPP |
| SEQ ID NO: 557 | GPPTAPPG |
| SEQ ID NO: 558 | PPTAPPGG |
| SEQ ID NO: 559 | PTAPPGGA |
| SEQ ID NO: 560 | LFLGPPTAP |
| SEQ ID NO: 561 | FLGPPTAPP |
| SEQ ID NO: 562 | LGPPTAPPG |
| SEQ ID NO: 563 | GPPTAPPGG |
| SEQ ID NO: 564 | PPTAPPGGA |
| SEQ ID NO: 565 | PTAPPGGAW |
| SEQ ID NO: 566 | LLFLGPPTAP |
| SEQ ID NO: 567 | LFLGPPTAPP |
| SEQ ID NO: 568 | FLGPPTAPPG |
| SEQ ID NO: 569 | LGPPTAPPGG |
| SEQ ID NO: 570 | GPPTAPPGGA |
| SEQ ID NO: 571 | PPTAPPGGAW |
| SEQ ID NO: 572 | PTAPPGGAWT |
| SEQ ID NO: 573 | TLLFLGPPTAP |
| SEQ ID NO: 574 | LLFLGPPTAPP |
| SEQ ID NO: 575 | LFLGPPTAPPG |
| SEQ ID NO: 576 | FLGPPTAPPGG |
| SEQ ID NO: 577 | LGPPTAPPGGA |
| SEQ ID NO: 578 | GPPTAPPGGAW |
| SEQ ID NO: 579 | PPTAPPGGAWT |
| SEQ ID NO: 580 | PTAPPGGAWTP |
| SEQ ID NO: 581 | QTLLFLGPPTAP |
| SEQ ID NO: 582 | TLLFLGPPTAPP |
| SEQ ID NO: 583 | LLFLGPPTAPPG |
| SEQ ID NO: 584 | LFLGPPTAPPGG |
| SEQ ID NO: 585 | FLGPPTAPPGGA |
| SEQ ID NO: 586 | LGPPTAPPGGAW |
| SEQ ID NO: 587 | GPPTAPPGGAWT |
| SEQ ID NO: 588 | PPTAPPGGAWTP |
| SEQ ID NO: 589 | PTAPPGGAWTPH |
| SEQ ID NO: 590 | NQTLLFLGPPTAP |
| SEQ ID NO: 591 | QTLLFLGPPTAPP |
| SEQ ID NO: 592 | TLLFLGPPTAPPG |
| SEQ ID NO: 593 | LLFLGPPTAPPGG |
| SEQ ID NO: 594 | LFLGPPTAPPGGA |
| SEQ ID NO: 595 | FLGPPTAPPGGAW |
| SEQ ID NO: 596 | LGPPTAPPGGAWT |
| SEQ ID NO: 597 | GPPTAPPGGAWTP |
| SEQ ID NO: 598 | PPTAPPGGAWTPH |
| SEQ ID NO: 599 | PTAPPGGAWTPHA |
| SEQ ID NO: 600 | INQTLLFLGPPTAP |
| SEQ ID NO: 601 | NQTLLFLGPPTAPP |
| SEQ ID NO: 602 | QTLLFLGPPTAPPG |
| SEQ ID NO: 603 | TLLFLGPPTAPPGG |
| SEQ ID NO: 604 | LLFLGPPTAPPGGA |
| SEQ ID NO: 605 | LFLGPPTAPPGGAW |
| SEQ ID NO: 606 | FLGPPTAPPGGAWT |
| SEQ ID NO: 607 | LGPPTAPPGGAWTP |
| SEQ ID NO: 608 | GPPTAPPGGAWTPH |
| SEQ ID NO: 609 | PPTAPPGGAWTPHA |
| SEQ ID NO: 610 | PTAPPGGAWTPHAR |
| SEQ ID NO: 611 | KINQTLLFLGPPTAP |
| SEQ ID NO: 612 | INQTLLFLGPPTAPP |
| SEQ ID NO: 613 | NQTLLFLGPPTAPPG |
| SEQ ID NO: 614 | QTLLFLGPPTAPPGG |
| SEQ ID NO: 615 | TLLFLGPPTAPPGGA |
| SEQ ID NO: 616 | LLFLGPPTAPPGGAW |
| SEQ ID NO: 617 | LFLGPPTAPPGGAWT |
| SEQ ID NO: 618 | FLGPPTAPPGGAWTP |
| SEQ ID NO: 619 | LGPPTAPPGGAWTPH |
| SEQ ID NO: 620 | GPPTAPPGGAWTPHA |
| SEQ ID NO: 621 | PPTAPPGGAWTPHAR |
| SEQ ID NO: 622 | PTAPPGGAWTPHARV |
| SEQ ID NO: 623 | MKINQTLLFLGPPTAP |
| SEQ ID NO: 624 | KINQTLLFLGPPTAPP |
| SEQ ID NO: 625 | INQTLLFLGPPTAPPG |
| SEQ ID NO: 626 | NQTLLFLGPPTAPPGG |
| SEQ ID NO: 627 | QTLLFLGPPTAPPGGA |
| SEQ ID NO: 628 | TLLFLGPPTAPPGGAW |
| SEQ ID NO: 629 | LLFLGPPTAPPGGAWT |
| SEQ ID NO: 630 | LFLGPPTAPPGGAWTP |
| SEQ ID NO: 631 | FLGPPTAPPGGAWTPH |
| SEQ ID NO: 632 | LGPPTAPPGGAWTPHA |
| SEQ ID NO: 633 | GPPTAPPGGAWTPHAR |
| SEQ ID NO: 634 | PPTAPPGGAWTPHARV |
| SEQ ID NO: 635 | PTAPPGGAWTPHARVC |
| SEQ ID NO: 636 | WMKINQTLLFLGPPTAP |
| SEQ ID NO: 637 | MKINQTLLFLGPPTAPP |
| SEQ ID NO: 638 | KINQTLLFLGPPTAPPG |
| SEQ ID NO: 639 | INQTLLFLGPPTAPPGG |
| SEQ ID NO: 640 | NQTLLFLGPPTAPPGGA |
| SEQ ID NO: 641 | QTLLFLGPPTAPPGGAW |
| SEQ ID NO: 642 | TLLFLGPPTAPPGGAWT |
| SEQ ID NO: 643 | LLFLGPPTAPPGGAWTP |
| SEQ ID NO: 644 | LFLGPPTAPPGGAWTPH |
| SEQ ID NO: 645 | FLGPPTAPPGGAWTPHA |
| SEQ ID NO: 646 | LGPPTAPPGGAWTPHAR |
| SEQ ID NO: 647 | GPPTAPPGGAWTPHARV |
| SEQ ID NO: 648 | PPTAPPGGAWTPHARVC |
| SEQ ID NO: 649 | PTAPPGGAWTPHARVCY |
| SEQ ID NO: 650 | VWMKINQTLLFLGPPTAP |
| SEQ ID NO: 651 | WMKINQTLLFLGPPTAPP |
| SEQ ID NO: 652 | MKINQTLLFLGPPTAPPG |
| SEQ ID NO: 653 | KINQTLLFLGPPTAPPGG |
| SEQ ID NO: 654 | INQTLLFLGPPTAPPGGA |
| SEQ ID NO: 655 | NQTLLFLGPPTAPPGGAW |
| SEQ ID NO: 656 | QTLLFLGPPTAPPGGAWT |
| SEQ ID NO: 657 | TLLFLGPPTAPPGGAWTP |
| SEQ ID NO: 658 | LLFLGPPTAPPGGAWTPH |
| SEQ ID NO: 659 | LFLGPPTAPPGGAWTPHA |
| SEQ ID NO: 660 | FLGPPTAPPGGAWTPHAR |
| SEQ ID NO: 661 | LGPPTAPPGGAWTPHARV |
| SEQ ID NO: 662 | GPPTAPPGGAWTPHARVC |
| SEQ ID NO: 663 | PPTAPPGGAWTPHARVCY |
| SEQ ID NO: 664 | PTAPPGGAWTPHARVCYA |
| SEQ ID NO: 665 | LVWMKINQTLLFLGPPTAP |
| SEQ ID NO: 666 | VWMKINQTLLFLGPPTAPP |
| SEQ ID NO: 667 | WMKINQTLLFLGPPTAPPG |
| SEQ ID NO: 668 | MKINQTLLFLGPPTAPPGG |
| SEQ ID NO: 669 | KINQTLLFLGPPTAPPGGA |
| SEQ ID NO: 670 | INQTLLFLGPPTAPPGGAW |
| SEQ ID NO: 671 | NQTLLFLGPPTAPPGGAWT |
| SEQ ID NO: 672 | QTLLFLGPPTAPPGGAWTP |
| SEQ ID NO: 673 | TLLFLGPPTAPPGGAWTPH |
| SEQ ID NO: 674 | LLFLGPPTAPPGGAWTPHA |
| SEQ ID NO: 675 | LFLGPPTAPPGGAWTPHAR |
| SEQ ID NO: 676 | FLGPPTAPPGGAWTPHARV |
| SEQ ID NO: 677 | LGPPTAPPGGAWTPHARVC |
| SEQ ID NO: 678 | GPPTAPPGGAWTPHARVCY |
| SEQ ID NO: 679 | PPTAPPGGAWTPHARVCYA |
| SEQ ID NO: 680 | PTAPPGGAWTPHARVCYAN |
| SEQ ID NO: 681 | ALVWMKINQTLLFLGPPTAP |
| SEQ ID NO: 682 | LVWMKINQTLLFLGPPTAPP |
| SEQ ID NO: 683 | VWMKINQTLLFLGPPTAPPG |
| SEQ ID NO: 684 | WMKINQTLLFLGPPTAPPGG |
| SEQ ID NO: 685 | MKINQTLLFLGPPTAPPGGA |
| SEQ ID NO: 686 | KINQTLLFLGPPTAPPGGAW |
| SEQ ID NO: 687 | INQTLLFLGPPTAPPGGAWT |
| SEQ ID NO: 688 | NQTLLFLGPPTAPPGGAWTP |
| SEQ ID NO: 689 | QTLLFLGPPTAPPGGAWTPH |
| SEQ ID NO: 690 | TLLFLGPPTAPPGGAWTPHA |
| SEQ ID NO: 691 | LLFLGPPTAPPGGAWTPHAR |
| SEQ ID NO: 692 | LFLGPPTAPPGGAWTPHARV |
| SEQ ID NO: 693 | FLGPPTAPPGGAWTPHARVC |
| SEQ ID NO: 694 | LGPPTAPPGGAWTPHARVCY |
| SEQ ID NO: 695 | GPPTAPPGGAWTPHARVCYA |
| SEQ ID NO: 696 | PPTAPPGGAWTPHARVCYAN |
| SEQ ID NO: 697 | PTAPPGGAWTPHARVCYANI |

TABLE 6
P(T/S)AP Motif Containing Peptides from Human
Herpesvirus 2 Strain 333 Glycoprotein I
(GenBank Accession No. P06764)

| | |
|---|---|
| SEQ ID NO: 698 | PRSGPTAP |
| SEQ ID NO: 699 | RSGPTAPQ |
| SEQ ID NO: 700 | SGPTAPQE |
| SEQ ID NO: 701 | GPTAPQEV |
| SEQ ID NO: 702 | RPRSGPTAP |
| SEQ ID NO: 703 | PRSGPTAPQ |
| SEQ ID NO: 704 | RSGPTAPQE |
| SEQ ID NO: 705 | SGPTAPQEV |
| SEQ ID NO: 706 | PRPRSGPTAP |
| SEQ ID NO: 707 | RPRSGPTAPQ |
| SEQ ID NO: 708 | PRSGPTAPQE |
| SEQ ID NO: 709 | RSGPTAPQEV |
| SEQ ID NO: 710 | SPRPRSGPTAP |
| SEQ ID NO: 711 | PRPRSGPTAPQ |
| SEQ ID NO: 712 | RPRSGPTAPQE |
| SEQ ID NO: 713 | PRSGPTAPQEV |
| SEQ ID NO: 714 | VSPRPRSGPTAP |
| SEQ ID NO: 715 | SPRPRSGPTAPQ |
| SEQ ID NO: 716 | PRPRSGPTAPQE |
| SEQ ID NO: 717 | RPRSGPTAPQEV |
| SEQ ID NO: 718 | SVSPRPRSGPTAP |
| SEQ ID NO: 719 | VSPRPRSGPTAPQ |
| SEQ ID NO: 720 | SPRPRSGPTAPQE |
| SEQ ID NO: 721 | PRPRSGPTAPQEV |
| SEQ ID NO: 722 | LSVSPRPRSGPTAP |
| SEQ ID NO: 723 | SVSPRPRSGPTAPQ |
| SEQ ID NO: 724 | VSPRPRSGPTAPQE |
| SEQ ID NO: 725 | SPRPRSGPTAPQEV |
| SEQ ID NO: 726 | LLSVSPRPRSGPTAP |
| SEQ ID NO: 727 | LSVSPRPRSGPTAPQ |
| SEQ ID NO: 728 | SVSPRPRSGPTAPQE |
| SEQ ID NO: 729 | VSPRPRSGPTAPQEV |
| SEQ ID NO: 730 | VLLSVSPRPRSGPTAP |
| SEQ ID NO: 731 | LLSVSPRPRSGPTAPQ |
| SEQ ID NO: 732 | LSVSPRPRSGPTAPQE |
| SEQ ID NO: 733 | SVSPRPRSGPTAPQEV |
| SEQ ID NO: 734 | VVLLSVSPRPRSGPTAP |
| SEQ ID NO: 735 | VLLSVSPRPRSGPTAPQ |
| SEQ ID NO: 736 | LLSVSPRPRSGPTAPQE |
| SEQ ID NO: 737 | LSVSPRPRSGPTAPQEV |
| SEQ ID NO: 738 | PVVLLSVSPRPRSGPTAP |
| SEQ ID NO: 739 | VVLLSVSPRPRSGPTAPQ |
| SEQ ID NO: 740 | VLLSVSPRPRSGPTAPQE |
| SEQ ID NO: 741 | LLSVSPRPRSGPTAPQEV |
| SEQ ID NO: 742 | GPVVLLSVSPRPRSGPTAP |
| SEQ ID NO: 743 | PVVLLSVSPRPRSGPTAPQ |
| SEQ ID NO: 744 | VVLLSVSPRPRSGPTAPQE |
| SEQ ID NO: 745 | VLLSVSPRPRSGPTAPQEV |
| SEQ ID NO: 746 | PGPVVLLSVSPRPRSGPTAP |
| SEQ ID NO: 747 | GPVVLLSVSPRPRSGPTAPQ |
| SEQ ID NO: 748 | PVVLLSVSPRPRSGPTAPQE |
| SEQ ID NO: 749 | VVLLSVSPRPRSGPTAPQEV |

TABLE 7
P(T/S)AP Motif Containing Peptides from Human
Herpesvirus 4/Epstein Barr Virus
BYRF1, Encodes EBNA-2 Protein
(GenBank Accession No. NP_039845)

| | |
|---|---|
| SEQ ID NO: 750 | PPLRPTAP |
| SEQ ID NO: 751 | PLRPTAPT |
| SEQ ID NO: 752 | LRPTAPTI |
| SEQ ID NO: 753 | RPTAPTIL |
| SEQ ID NO: 754 | PTAPTILS |
| SEQ ID NO: 755 | VPPLRPTAP |
| SEQ ID NO: 756 | PPLRPTAPT |
| SEQ ID NO: 757 | PLRPTAPTI |
| SEQ ID NO: 758 | LRPTAPTIL |
| SEQ ID NO: 759 | RPTAPTILS |
| SEQ ID NO: 760 | PTAPTILSP |
| SEQ ID NO: 761 | HVPPLRPTAP |
| SEQ ID NO: 762 | VPPLRPTAPT |
| SEQ ID NO: 763 | PPLRPTAPTI |
| SEQ ID NO: 764 | PLRPTAPTIL |
| SEQ ID NO: 765 | LRPTAPTILS |
| SEQ ID NO: 766 | RPTAPTILSP |
| SEQ ID NO: 767 | PTAPTILSPL |
| SEQ ID NO: 768 | PHVPPLRPTAP |
| SEQ ID NO: 769 | HVPPLRPTAPT |
| SEQ ID NO: 770 | VPPLRPTAPTI |
| SEQ ID NO: 771 | PPLRPTAPTIL |
| SEQ ID NO: 772 | PLRPTAPTILS |
| SEQ ID NO: 773 | LRPTAPTILSP |
| SEQ ID NO: 774 | RPTAPTILSPL |
| SEQ ID NO: 775 | PTAPTILSPLS |
| SEQ ID NO: 776 | QPHVPPLRPTAP |
| SEQ ID NO: 777 | PHVPPLRPTAPT |
| SEQ ID NO: 778 | HVPPLRPTAPTI |
| SEQ ID NO: 779 | VPPLRPTAPTIL |
| SEQ ID NO: 780 | PPLRPTAPTILS |
| SEQ ID NO: 781 | PLRPTAPTILSP |
| SEQ ID NO: 782 | LRPTAPTILSPL |
| SEQ ID NO: 783 | RPTAPTILSPLS |
| SEQ ID NO: 784 | PTAPTILSPLSQ |
| SEQ ID NO: 785 | VQPHVPPLRPTAP |
| SEQ ID NO: 786 | QPHVPPLRPTAPT |
| SEQ ID NO: 787 | PHVPPLRPTAPTI |
| SEQ ID NO: 788 | HVPPLRPTAPTIL |
| SEQ ID NO: 789 | VPPLRPTAPTILS |
| SEQ ID NO: 790 | PPLRPTAPTILSP |
| SEQ ID NO: 791 | PLRPTAPTILSPL |
| SEQ ID NO: 792 | LRPTAPTILSPLS |
| SEQ ID NO: 793 | RPTAPTILSPLSQ |
| SEQ ID NO: 794 | PTAPTILSPLSQP |
| SEQ ID NO: 795 | LVQPHVPPLRPTAP |
| SEQ ID NO: 796 | VQPHVPPLRPTAPT |
| SEQ ID NO: 797 | QPHVPPLRPTAPTI |
| SEQ ID NO: 798 | PHVPPLRPTAPTIL |
| SEQ ID NO: 799 | HVPPLRPTAPTILS |
| SEQ ID NO: 800 | VPPLRPTAPTILSP |
| SEQ ID NO: 801 | PPLRPTAPTILSPL |
| SEQ ID NO: 802 | PLRPTAPTILSPLS |
| SEQ ID NO: 803 | LRPTAPTILSPLSQ |
| SEQ ID NO: 804 | RPTAPTILSPLSQP |
| SEQ ID NO: 805 | PTAPTILSPLSQPR |
| SEQ ID NO: 806 | RLVQPHVPPLRPTAP |
| SEQ ID NO: 807 | LVQPHVPPLRPTAPT |
| SEQ ID NO: 808 | VQPHVPPLRPTAPTI |
| SEQ ID NO: 809 | QPHVPPLRPTAPTIL |
| SEQ ID NO: 810 | PHVPPLRPTAPTILS |
| SEQ ID NO: 811 | HVPPLRPTAPTILSP |
| SEQ ID NO: 812 | VPPLRPTAPTILSPL |
| SEQ ID NO: 813 | PPLRPTAPTILSPLS |
| SEQ ID NO: 814 | PLRPTAPTILSPLSQ |
| SEQ ID NO: 815 | LRPTAPTILSPLSQP |
| SEQ ID NO: 816 | RPTAPTILSPLSQPR |
| SEQ ID NO: 817 | PTAPTILSPLSQPRL |
| SEQ ID NO: 818 | ARLVQPHVPPLRPTAP |
| SEQ ID NO: 819 | RLVQPHVPPLRPTAPT |
| SEQ ID NO: 820 | LVQPHVPPLRPTAPTI |
| SEQ ID NO: 821 | VQPHVPPLRPTAPTIL |
| SEQ ID NO: 822 | QPHVPPLRPTAPTILS |
| SEQ ID NO: 823 | PHVPPLRPTAPTILSP |
| SEQ ID NO: 824 | HVPPLRPTAPTILSPL |
| SEQ ID NO: 825 | VPPLRPTAPTILSPLS |
| SEQ ID NO: 826 | PPLRPTAPTILSPLSQ |
| SEQ ID NO: 827 | PLRPTAPTILSPLSQP |
| SEQ ID NO: 828 | LRPTAPTILSPLSQPR |
| SEQ ID NO: 829 | RPTAPTILSPLSQPRL |
| SEQ ID NO: 830 | PTAPTILSPLSQPRLT |
| SEQ ID NO: 831 | QARLVQPHVPPLRPTAP |
| SEQ ID NO: 832 | ARLVQPHVPPLRPTAPT |
| SEQ ID NO: 833 | RLVQPHVPPLRPTAPTI |
| SEQ ID NO: 834 | LVQPHVPPLRPTAPTIL |
| SEQ ID NO: 835 | VQPHVPPLRPTAPTILS |
| SEQ ID NO: 836 | QPHVPPLRPTAPTILSP |
| SEQ ID NO: 837 | PHVPPLRPTAPTILSPL |
| SEQ ID NO: 838 | HVPPLRPTAPTILSPLS |
| SEQ ID NO: 839 | VPPLRPTAPTILSPLSQ |
| SEQ ID NO: 840 | PPLRPTAPTILSPLSQP |
| SEQ ID NO: 841 | PLRPTAPTILSPLSQPR |
| SEQ ID NO: 842 | LRPTAPTILSPLSQPRL |
| SEQ ID NO: 843 | RPTAPTILSPLSQPRLT |
| SEQ ID NO: 844 | PTAPTILSPLSQPRLTP |
| SEQ ID NO: 845 | PQARLVQPHVPPLRPTAP |
| SEQ ID NO: 846 | QARLVQPHVPPLRPTAPT |
| SEQ ID NO: 847 | ARLVQPHVPPLRPTAPTI |
| SEQ ID NO: 848 | RLVQPHVPPLRPTAPTIL |
| SEQ ID NO: 849 | LVQPHVPPLRPTAPTILS |
| SEQ ID NO: 850 | VQPHVPPLRPTAPTILSP |
| SEQ ID NO: 851 | QPHVPPLRPTAPTILSPL |
| SEQ ID NO: 852 | PHVPPLRPTAPTILSPLS |
| SEQ ID NO: 853 | HVPPLRPTAPTILSPLSQ |
| SEQ ID NO: 854 | VPPLRPTAPTILSPLSQP |
| SEQ ID NO: 855 | PPLRPTAPTILSPLSQPR |
| SEQ ID NO: 856 | PLRPTAPTILSPLSQPRL |
| SEQ ID NO: 857 | LRPTAPTILSPLSQPRLT |
| SEQ ID NO: 858 | RPTAPTILSPLSQPRLTP |
| SEQ ID NO: 859 | PTAPTILSPLSQPRLTPP |
| SEQ ID NO: 860 | APQARLVQPHVPPLRPTAP |
| SEQ ID NO: 861 | PQARLVQPHVPPLRPTAPT |
| SEQ ID NO: 862 | QARLVQPHVPPLRPTAPTI |
| SEQ ID NO: 863 | ARLVQPHVPPLRPTAPTIL |
| SEQ ID NO: 864 | RLVQPHVPPLRPTAPTILS |
| SEQ ID NO: 865 | LVQPHVPPLRPTAPTILSP |
| SEQ ID NO: 866 | VQPHVPPLRPTAPTILSPL |
| SEQ ID NO: 867 | QPHVPPLRPTAPTILSPLS |
| SEQ ID NO: 868 | PHVPPLRPTAPTILSPLSQ |
| SEQ ID NO: 869 | HVPPLRPTAPTILSPLSQP |
| SEQ ID NO: 870 | VPPLRPTAPTILSPLSQPR |
| SEQ ID NO: 871 | PPLRPTAPTILSPLSQPRL |
| SEQ ID NO: 872 | PLRPTAPTILSPLSQPRLT |
| SEQ ID NO: 873 | LRPTAPTILSPLSQPRLTP |
| SEQ ID NO: 874 | RPTAPTILSPLSQPRLTPP |
| SEQ ID NO: 875 | PTAPTILSPLSQPRLTPPQ |
| SEQ ID NO: 876 | TAPQARLVQPHVPPLRPTAP |
| SEQ ID NO: 877 | APQARLVQPHVPPLRPTAPT |
| SEQ ID NO: 878 | PQARLVQPHVPPLRPTAPTI |
| SEQ ID NO: 879 | QARLVQPHVPPLRPTAPTIL |
| SEQ ID NO: 880 | ARLVQPHVPPLRPTAPTILS |
| SEQ ID NO: 881 | RLVQPHVPPLRPTAPTILSP |
| SEQ ID NO: 882 | LVQPHVPPLRPTAPTILSPL |
| SEQ ID NO: 883 | VQPHVPPLRPTAPTILSPLS |
| SEQ ID NO: 884 | QPHVPPLRPTAPTILSPLSQ |
| SEQ ID NO: 885 | PHVPPLRPTAPTILSPLSQP |
| SEQ ID NO: 886 | HVPPLRPTAPTILSPLSQPR |
| SEQ ID NO: 887 | VPPLRPTAPTILSPLSQPRL |
| SEQ ID NO: 888 | PPLRPTAPTILSPLSQPRLT |
| SEQ ID NO: 889 | PLRPTAPTILSPLSQPRLTP |
| SEQ ID NO: 890 | LRPTAPTILSPLSQPRLTPP |
| SEQ ID NO: 891 | RPTAPTILSPLSQPRLTPPQ |
| SEQ ID NO: 892 | PTAPTILSPLSQPRLTPPQP |

TABLE 8
P(T/S)AP Motif Containing
Peptides from Influenza A Virus
(A/Pintail Duck/Alberta/114/7(H8N4))
(GenBank Accession No. AAG38554)

| | |
|---|---|
| SEQ ID NO: 893 | IVERPSAP |
| SEQ ID NO: 894 | VERPSAPE |
| SEQ ID NO: 895 | ERPSAPEG |
| SEQ ID NO: 896 | RPSAPEGM |
| SEQ ID NO: 897 | PSAPEGMC |
| SEQ ID NO: 898 | YIVERPSAP |
| SEQ ID NO: 899 | IVERPSAPE |
| SEQ ID NO: 900 | VERPSAPEG |
| SEQ ID NO: 901 | ERPSAPEGM |
| SEQ ID NO: 902 | RPSAPEGMC |
| SEQ ID NO: 903 | PSAPEGMCY |
| SEQ ID NO: 904 | SYIVERPSAP |
| SEQ ID NO: 905 | YIVERPSAPE |
| SEQ ID NO: 906 | IVERPSAPEG |
| SEQ ID NO: 907 | VERPSAPEGM |
| SEQ ID NO: 908 | ERPSAPEGMC |
| SEQ ID NO: 909 | RPSAPEGMCY |
| SEQ ID NO: 910 | PSAPEGMCYP |
| SEQ ID NO: 911 | WSYIVERPSAP |
| SEQ ID NO: 912 | SYIVERPSAPE |
| SEQ ID NO: 913 | YIVERPSAPEG |
| SEQ ID NO: 914 | IVERPSAPEGM |
| SEQ ID NO: 915 | VERPSAPEGMC |
| SEQ ID NO: 916 | ERPSAPEGMCY |
| SEQ ID NO: 917 | RPSAPEGMCYP |
| SEQ ID NO: 918 | PSAPEGMCYPG |
| SEQ ID NO: 919 | GWSYIVERPSAP |
| SEQ ID NO: 920 | WSYIVERPSAPE |
| SEQ ID NO: 921 | SYIVERPSAPEG |
| SEQ ID NO: 922 | YIVERPSAPEGM |
| SEQ ID NO: 923 | IVERPSAPEGMC |
| SEQ ID NO: 924 | VERPSAPEGMCY |
| SEQ ID NO: 925 | ERPSAPEGMCYP |
| SEQ ID NO: 926 | RPSAPEGMCYPG |
| SEQ ID NO: 927 | PSAPEGMCYPGS |
| SEQ ID NO: 928 | QGWSYIVERPSAP |
| SEQ ID NO: 929 | GWSYIVERPSAPE |
| SEQ ID NO: 930 | WSYIVERPSAPEG |
| SEQ ID NO: 931 | SYIVERPSAPEGM |
| SEQ ID NO: 932 | YIVERPSAPEGMC |
| SEQ ID NO: 933 | IVERPSAPEGMCY |
| SEQ ID NO: 934 | VERPSAPEGMCYP |
| SEQ ID NO: 935 | ERPSAPEGMCYPG |
| SEQ ID NO: 936 | RPSAPEGMCYPGS |
| SEQ ID NO: 937 | PSAPEGMCYPGSI |
| SEQ ID NO: 938 | DQGWSYIVERPSAP |
| SEQ ID NO: 939 | QGWSYIVERPSAPE |
| SEQ ID NO: 940 | GWSYIVERPSAPEG |
| SEQ ID NO: 941 | WSYIVERPSAPEGM |
| SEQ ID NO: 942 | SYIVERPSAPEGMC |
| SEQ ID NO: 943 | YIVERPSAPEGMCY |
| SEQ ID NO: 944 | IVERPSAPEGMCYP |
| SEQ ID NO: 945 | VERPSAPEGMCYPG |
| SEQ ID NO: 946 | ERPSAPEGMCYPGS |
| SEQ ID NO: 947 | RPSAPEGMCYPGSI |
| SEQ ID NO: 948 | PSAPEGMCYPGSIE |
| SEQ ID NO: 949 | KDQGWSYIVERPSAP |
| SEQ ID NO: 950 | DQGWSYIVERPSAPE |
| SEQ ID NO: 951 | QGWSYIVERPSAPEG |
| SEQ ID NO: 952 | GWSYIVERPSAPEGM |
| SEQ ID NO: 953 | WSYIVERPSAPEGMC |
| SEQ ID NO: 954 | SYIVERPSAPEGMCY |
| SEQ ID NO: 955 | YIVERPSAPEGMCYP |
| SEQ ID NO: 956 | IVERPSAPEGMCYPG |
| SEQ ID NO: 957 | VERPSAPEGMCYPGS |
| SEQ ID NO: 958 | ERPSAPEGMCYPGSI |
| SEQ ID NO: 959 | RPSAPEGMCYPGSIE |
| SEQ ID NO: 960 | PSAPEGMCYPGSIEN |
| SEQ ID NO: 961 | LKDQGWSYIVERPSAP |
| SEQ ID NO: 962 | KDQGWSYIVERPSAPE |
| SEQ ID NO: 963 | DQGWSYIVERPSAPEG |
| SEQ ID NO: 964 | QGWSYIVERPSAPEGM |
| SEQ ID NO: 965 | GWSYIVERPSAPEGMC |
| SEQ ID NO: 966 | WSYIVERPSAPEGMCY |
| SEQ ID NO: 967 | SYIVERPSAPEGMCYP |
| SEQ ID NO: 968 | YIVERPSAPEGMCYPG |
| SEQ ID NO: 969 | IVERPSAPEGMCYPGS |
| SEQ ID NO: 970 | VERPSAPEGMCYPGSI |
| SEQ ID NO: 971 | ERPSAPEGMCYPGSIE |
| SEQ ID NO: 972 | RPSAPEGMCYPGSIEN |
| SEQ ID NO: 973 | PSAPEGMCYPGSIENL |
| SEQ ID NO: 974 | HLKDQGWSYIVERPSAP |
| SEQ ID NO: 975 | LKDQGWSYIVERPSAPE |
| SEQ ID NO: 976 | KDQGWSYIVERPSAPEG |
| SEQ ID NO: 977 | DQGWSYIVERPSAPEGM |
| SEQ ID NO: 978 | QGWSYIVERPSAPEGMC |
| SEQ ID NO: 979 | GWSYIVERPSAPEGMCY |
| SEQ ID NO: 980 | WSYIVERPSAPEGMCYP |
| SEQ ID NO: 981 | SYIVERPSAPEGMCYPG |
| SEQ ID NO: 982 | YIVERPSAPEGMCYPGS |
| SEQ ID NO: 983 | IVERPSAPEGMCYPGSI |
| SEQ ID NO: 984 | VERPSAPEGMCYPGSIE |
| SEQ ID NO: 985 | ERPSAPEGMCYPGSIEN |
| SEQ ID NO: 986 | RPSAPEGMCYPGSIENL |
| SEQ ID NO: 987 | PSAPEGMCYPGSIENLE |
| SEQ ID NO: 988 | IHLKDQGWSYIVERPSAP |
| SEQ ID NO: 989 | HLKDQGWSYIVERPSAPE |
| SEQ ID NO: 990 | LKDQGWSYIVERPSAPEG |
| SEQ ID NO: 991 | KDQGWSYIVERPSAPEGM |
| SEQ ID NO: 992 | DQGWSYIVERPSAPEGMC |
| SEQ ID NO: 993 | QGWSYIVERPSAPEGMCY |
| SEQ ID NO: 994 | GWSYIVERPSAPEGMCYP |
| SEQ ID NO: 995 | WSYIVERPSAPEGMCYPG |
| SEQ ID NO: 996 | SYIVERPSAPEGMCYPGS |
| SEQ ID NO: 997 | YIVERPSAPEGMCYPGSI |
| SEQ ID NO: 998 | IVERPSAPEGMCYPGSIE |
| SEQ ID NO: 999 | VERPSAPEGMCYPGSIEN |
| SEQ ID NO: 1000 | ERPSAPEGMCYPGSIENL |
| SEQ ID NO: 1001 | RPSAPEGMCYPGSIENLE |
| SEQ ID NO: 1002 | PSAPEGMCYPGSIENLEE |
| SEQ ID NO: 1003 | DIHLKDQGWSYIVERPSAP |
| SEQ ID NO: 1004 | IHLKDQGWSYIVERPSAPE |
| SEQ ID NO: 1005 | HLKDQGWSYIVERPSAPEG |
| SEQ ID NO: 1006 | LKDQGWSYIVERPSAPEGM |
| SEQ ID NO: 1007 | KDQGWSYIVERPSAPEGMC |
| SEQ ID NO: 1008 | DQGWSYIVERPSAPEGMCY |
| SEQ ID NO: 1009 | QGWSYIVERPSAPEGMCYP |
| SEQ ID NO: 1010 | GWSYIVERPSAPEGMCYPG |
| SEQ ID NO: 1011 | WSYIVERPSAPEGMCYPGS |
| SEQ ID NO: 1012 | SYIVERPSAPEGMCYPGSI |
| SEQ ID NO: 1013 | YIVERPSAPEGMCYPGSIE |
| SEQ ID NO: 1014 | IVERPSAPEGMCYPGSIEN |
| SEQ ID NO: 1015 | VERPSAPEGMCYPGSIENL |
| SEQ ID NO: 1016 | ERPSAPEGMCYPGSIENLE |
| SEQ ID NO: 1017 | RPSAPEGMCYPGSIENLEE |
| SEQ ID NO: 1018 | PSAPEGMCYPGSIENLEEL |
| SEQ ID NO: 1019 | CDIHLKDQGWSYIVERPSAP |
| SEQ ID NO: 1020 | DIHLKDQGWSYIVERPSAPE |
| SEQ ID NO: 1021 | IHLKDQGWSYIVERPSAPEG |
| SEQ ID NO: 1022 | HLKDQGWSYIVERPSAPEGM |
| SEQ ID NO: 1023 | LKDQGWSYIVERPSAPEGMC |
| SEQ ID NO: 1024 | KDQGWSYIVERPSAPEGMCY |
| SEQ ID NO: 1025 | DQGWSYIVERPSAPEGMCYP |
| SEQ ID NO: 1026 | QGWSYIVERPSAPEGMCYPG |
| SEQ ID NO: 1027 | GWSYIVERPSAPEGMCYPGS |
| SEQ ID NO: 1028 | WSYIVERPSAPEGMCYPGSI |
| SEQ ID NO: 1029 | SYIVERPSAPEGMCYPGSIE |
| SEQ ID NO: 1030 | YIVERPSAPEGMCYPGSIEN |
| SEQ ID NO: 1031 | IVERPSAPEGMCYPGSIENL |
| SEQ ID NO: 1032 | VERPSAPEGMCYPGSIENLE |
| SEQ ID NO: 1033 | ERPSAPEGMCYPGSIENLEE |
| SEQ ID NO: 1034 | RPSAPEGMCYPGSIENLEEL |
| SEQ ID NO: 1035 | PSAPEGMCYPGSIENLEELR |

TABLE 9
P(T/S)AP Motif Containing Peptides from Human
Papillomavirus L1 Protein My09/My11 Region
(GenBank Accession No. AAA67231)

| | |
|---|---|
| SEQ ID NO: 1036 | CQKGPSAP |
| SEQ ID NO: 1037 | QKGPSAPA |
| SEQ ID NO: 1038 | KGPSAPAP |
| SEQ ID NO: 1039 | GPSAPAPK |
| SEQ ID NO: 1040 | PSAPAPKK |
| SEQ ID NO: 1041 | TCQKGPSAP |
| SEQ ID NO: 1042 | CQKGPSAPA |
| SEQ ID NO: 1043 | QKGPSAPAP |
| SEQ ID NO: 1044 | KGPSAPAPK |
| SEQ ID NO: 1045 | GPSAPAPKK |
| SEQ ID NO: 1046 | PSAPAPKKD |
| SEQ ID NO: 1047 | ITCQKGPSAP |
| SEQ ID NO: 1048 | TCQKGPSAPA |
| SEQ ID NO: 1049 | CQKGPSAPAP |
| SEQ ID NO: 1050 | QKGPSAPAPK |
| SEQ ID NO: 1051 | KGPSAPAPKK |
| SEQ ID NO: 1052 | GPSAPAPKKD |
| SEQ ID NO: 1053 | PSAPAPKKDP |
| SEQ ID NO: 1054 | AITCQKGPSAP |
| SEQ ID NO: 1055 | ITCQKGPSAPA |
| SEQ ID NO: 1056 | TCQKGPSAPAP |
| SEQ ID NO: 1057 | CQKGPSAPAPK |
| SEQ ID NO: 1058 | QKGPSAPAPKK |
| SEQ ID NO: 1059 | KGPSAPAPKKD |
| SEQ ID NO: 1060 | GPSAPAPKKDP |
| SEQ ID NO: 1061 | PSAPAPKKDPY |
| SEQ ID NO: 1062 | RAITCQKGPSAP |
| SEQ ID NO: 1063 | AITCQKGPSAPA |
| SEQ ID NO: 1064 | ITCQKGPSAPAP |
| SEQ ID NO: 1065 | TCQKGPSAPAPK |
| SEQ ID NO: 1066 | CQKGPSAPAPKK |
| SEQ ID NO: 1067 | QKGPSAPAPKKD |
| SEQ ID NO: 1068 | KGPSAPAPKKDP |
| SEQ ID NO: 1069 | GPSAPAPKKDPY |
| SEQ ID NO: 1070 | PSAPAPKKDPYD |
| SEQ ID NO: 1071 | SRAITCQKGPSAP |
| SEQ ID NO: 1072 | RAITCQKGPSAPA |
| SEQ ID NO: 1073 | AITCQKGPSAPAP |
| SEQ ID NO: 1074 | ITCQKGPSAPAPK |
| SEQ ID NO: 1075 | TCQKGPSAPAPKK |
| SEQ ID NO: 1076 | CQKGPSAPAPKKD |
| SEQ ID NO: 1077 | QKGPSAPAPKKDP |
| SEQ ID NO: 1078 | KGPSAPAPKKDPY |
| SEQ ID NO: 1079 | GPSAPAPKKDPYD |
| SEQ ID NO: 1080 | PSAPAPKKDPYDG |
| SEQ ID NO: 1081 | QSRAITCQKGPSAP |
| SEQ ID NO: 1082 | SRAITCQKGPSAPA |
| SEQ ID NO: 1083 | RAITCQKGPSAPAP |
| SEQ ID NO: 1084 | AITCQKGPSAPAPK |
| SEQ ID NO: 1085 | ITCQKGPSAPAPKK |
| SEQ ID NO: 1086 | TCQKGPSAPAPKKD |
| SEQ ID NO: 1087 | CQKGPSAPAPKKDP |
| SEQ ID NO: 1088 | QKGPSAPAPKKDPY |
| SEQ ID NO: 1089 | KGPSAPAPKKDPYD |
| SEQ ID NO: 1090 | GPSAPAPKKDPYDG |
| SEQ ID NO: 1091 | PSAPAPKKDPYDGL |
| SEQ ID NO: 1092 | LQSRAITCQKGPSAP |
| SEQ ID NO: 1093 | QSRAITCQKGPSAPA |
| SEQ ID NO: 1094 | SRAITCQKGPSAPAP |
| SEQ ID NO: 1095 | RAITCQKGPSAPAPK |
| SEQ ID NO: 1096 | AITCQKGPSAPAPKK |
| SEQ ID NO: 1097 | ITCQKGPSAPAPKKD |
| SEQ ID NO: 1098 | TCQKGPSAPAPKKDP |
| SEQ ID NO: 1099 | CQKGPSAPAPKKDPY |
| SEQ ID NO: 1100 | QKGPSAPAPKKDPYD |
| SEQ ID NO: 1101 | KGPSAPAPKKDPYDG |
| SEQ ID NO: 1102 | GPSAPAPKKDPYDGL |
| SEQ ID NO: 1103 | PSAPAPKKDPYDGLV |
| SEQ ID NO: 1104 | YLQSRAITCQKGPSAP |
| SEQ ID NO: 1105 | LQSRAITCQKGPSAPA |
| SEQ ID NO: 1106 | QSRAITCQKGPSAPAP |
| SEQ ID NO: 1107 | SRAITCQKGPSAPAPK |
| SEQ ID NO: 1108 | RAITCQKGPSAPAPKK |
| SEQ ID NO: 1109 | AITCQKGPSAPAPKKD |
| SEQ ID NO: 1110 | ITCQKGPSAPAPKKDP |
| SEQ ID NO: 1111 | TCQKGPSAPAPKKDPY |
| SEQ ID NO: 1112 | CQKGPSAPAPKKDPYD |
| SEQ ID NO: 1113 | QKGPSAPAPKKDPYDG |
| SEQ ID NO: 1114 | KGPSAPAPKKDPYDGL |
| SEQ ID NO: 1115 | GPSAPAPKKDPYDGLV |
| SEQ ID NO: 1116 | PSAPAPKKDPYDGLVF |
| SEQ ID NO: 1117 | RYLQSRAITCQKGPSAP |
| SEQ ID NO: 1118 | YLQSRAITCQKGPSAPA |
| SEQ ID NO: 1119 | LQSRAITCQKGPSAPAP |
| SEQ ID NO: 1120 | QSRAITCQKGPSAPAPK |
| SEQ ID NO: 1121 | SRAITCQKGPSAPAPKK |
| SEQ ID NO: 1122 | RAITCQKGPSAPAPKKD |
| SEQ ID NO: 1123 | AITCQKGPSAPAPKKDP |
| SEQ ID NO: 1124 | ITCQKGPSAPAPKKDPY |
| SEQ ID NO: 1125 | TCQKGPSAPAPKKDPYD |
| SEQ ID NO: 1126 | CQKGPSAPAPKKDPYDG |
| SEQ ID NO: 1127 | QKGPSAPAPKKDPYDGL |
| SEQ ID NO: 1128 | KGPSAPAPKKDPYDGLV |
| SEQ ID NO: 1129 | GPSAPAPKKDPYDGLVF |
| SEQ ID NO: 1130 | PSAPAPKKDPYDGLVFW |
| SEQ ID NO: 1131 | YRYLQSRAITCQKGPSAP |
| SEQ ID NO: 1132 | RYLQSRAITCQKGPSAPA |
| SEQ ID NO: 1133 | YLQSRAITCQKGPSAPAP |
| SEQ ID NO: 1134 | LQSRAITCQKGPSAPAPK |
| SEQ ID NO: 1135 | QSRAITCQKGPSAPAPKK |
| SEQ ID NO: 1136 | SRAITCQKGPSAPAPKKD |
| SEQ ID NO: 1137 | RAITCQKGPSAPAPKKDP |
| SEQ ID NO: 1138 | AITCQKGPSAPAPKKDPY |
| SEQ ID NO: 1139 | ITCQKGPSAPAPKKDPYD |
| SEQ ID NO: 1140 | TCQKGPSAPAPKKDPYDG |
| SEQ ID NO: 1141 | CQKGPSAPAPKKDPYDGL |
| SEQ ID NO: 1142 | QKGPSAPAPKKDPYDGLV |
| SEQ ID NO: 1143 | KGPSAPAPKKDPYDGLVF |
| SEQ ID NO: 1144 | GPSAPAPKKDPYDGLVFW |
| SEQ ID NO: 1145 | PSAPAPKKDPYDGLVFWE |
| SEQ ID NO: 1146 | TYRYLQSRAITCQKGPSAP |
| SEQ ID NO: 1147 | YRYLQSRAITCQKGPSAPA |
| SEQ ID NO: 1148 | RYLQSRAITCQKGPSAPAP |
| SEQ ID NO: 1149 | YLQSRAITCQKGPSAPAPK |
| SEQ ID NO: 1150 | LQSRAITCQKGPSAPAPKK |
| SEQ ID NO: 1151 | QSRAITCQKGPSAPAPKKD |
| SEQ ID NO: 1152 | SRAITCQKGPSAPAPKKDP |
| SEQ ID NO: 1153 | RAITCQKGPSAPAPKKDPY |
| SEQ ID NO: 1154 | AITCQKGPSAPAPKKDPYD |
| SEQ ID NO: 1155 | ITCQKGPSAPAPKKDPYDG |
| SEQ ID NO: 1156 | TCQKGPSAPAPKKDPYDGL |
| SEQ ID NO: 1157 | CQKGPSAPAPKKDPYDGLV |
| SEQ ID NO: 1158 | QKGPSAPAPKKDPYDGLVF |
| SEQ ID NO: 1159 | KGPSAPAPKKDPYDGLVFW |
| SEQ ID NO: 1160 | GPSAPAPKKDPYDGLVFWE |
| SEQ ID NO: 1161 | PSAPAPKKDPYDGLVFWEV |
| SEQ ID NO: 1162 | DTYRYLQSRAITCQKGPSAP |
| SEQ ID NO: 1163 | TYRYLQSRAITCQKGPSAPA |
| SEQ ID NO: 1164 | YRYLQSRAITCQKGPSAPAP |
| SEQ ID NO: 1165 | RYLQSRAITCQKGPSAPAPK |
| SEQ ID NO: 1166 | YLQSRAITCQKGPSAPAPKK |
| SEQ ID NO: 1167 | LQSRAITCQKGPSAPAPKKD |
| SEQ ID NO: 1168 | QSRAITCQKGPSAPAPKKDP |
| SEQ ID NO: 1169 | SRAITCQKGPSAPAPKKDPY |
| SEQ ID NO: 1170 | RAITCQKGPSAPAPKKDPYD |
| SEQ ID NO: 1171 | AITCQKGPSAPAPKKDPYDG |
| SEQ ID NO: 1172 | ITCQKGPSAPAPKKDPYDGL |
| SEQ ID NO: 1173 | TCQKGPSAPAPKKDPYDGLV |
| SEQ ID NO: 1174 | CQKGPSAPAPKKDPYDGLVF |
| SEQ ID NO: 1175 | QKGPSAPAPKKDPYDGLVFW |
| SEQ ID NO: 1176 | KGPSAPAPKKDPYDGLVFWE |
| SEQ ID NO: 1177 | GPSAPAPKKDPYDGLVFWEV |
| SEQ ID NO: 1178 | PSAPAPKKDPYDGLVFWEVD |

TABLE 10
P(T/S)AP Motif Containing Peptides from Human
Papillomavirus Type 23 Minor Capsid Protein L2
(GenBank Accession No. NP_043365)

| | |
|---|---|
| SEQ ID NO: 1179 | IFPLPSAP |
| SEQ ID NO: 1180 | FPLPSAPA |
| SEQ ID NO: 1181 | PLPSAPAV |
| SEQ ID NO: 1182 | LPSAPAVV |
| SEQ ID NO: 1183 | PSAPAVVI |
| SEQ ID NO: 1184 | IIFPLPSAP |
| SEQ ID NO: 1185 | IFPLPSAPA |
| SEQ ID NO: 1186 | FPLPSAPAV |
| SEQ ID NO: 1187 | PLPSAPAVV |
| SEQ ID NO: 1188 | LPSAPAVVI |
| SEQ ID NO: 1189 | PSAPAVVIH |
| SEQ ID NO: 1190 | TIIFPLPSAP |
| SEQ ID NO: 1191 | IIFPLPSAPA |
| SEQ ID NO: 1192 | IFPLPSAPAV |
| SEQ ID NO: 1193 | FPLPSAPAVV |
| SEQ ID NO: 1194 | PLPSAPAVVI |
| SEQ ID NO: 1195 | LPSAPAVVIH |
| SEQ ID NO: 1196 | PSAPAVVIHT |
| SEQ ID NO: 1197 | PTIIFPLPSAP |
| SEQ ID NO: 1198 | TIIFPLPSAPA |
| SEQ ID NO: 1199 | IIFPLPSAPAV |
| SEQ ID NO: 1200 | IFPLPSAPAVV |
| SEQ ID NO: 1201 | FPLPSAPAVVI |
| SEQ ID NO: 1202 | PLPSAPAVVIH |
| SEQ ID NO: 1203 | LPSAPAVVIHT |
| SEQ ID NO: 1204 | PSAPAVVIHTL |
| SEQ ID NO: 1205 | RPTIIFPLPSAP |
| SEQ ID NO: 1206 | PTIIFPLPSAPA |
| SEQ ID NO: 1207 | TIIFPLPSAPAV |
| SEQ ID NO: 1208 | IIFPLPSAPAVV |
| SEQ ID NO: 1209 | IFPLPSAPAVVI |
| SEQ ID NO: 1210 | FPLPSAPAVVIH |
| SEQ ID NO: 1211 | PLPSAPAVVIHT |
| SEQ ID NO: 1212 | LPSAPAVVIHTL |
| SEQ ID NO: 1213 | PSAPAVVIHTLD |
| SEQ ID NO: 1214 | ERPTIIFPLPSAP |
| SEQ ID NO: 1215 | RPTIIFPLPSAPA |
| SEQ ID NO: 1216 | PTIIFPLPSAPAV |
| SEQ ID NO: 1217 | TIIFPLPSAPAVV |
| SEQ ID NO: 1218 | IIFPLPSAPAVVI |
| SEQ ID NO: 1219 | IFPLPSAPAVVIH |
| SEQ ID NO: 1220 | FPLPSAPAVVIHT |
| SEQ ID NO: 1221 | PLPSAPAVVIHTL |
| SEQ ID NO: 1222 | LPSAPAVVIHTLD |
| SEQ ID NO: 1223 | PSAPAVVIHTLDK |
| SEQ ID NO: 1224 | TERPTIIFPLPSAP |
| SEQ ID NO: 1225 | ERPTIIFPLPSAPA |
| SEQ ID NO: 1226 | RPTIIFPLPSAPAV |
| SEQ ID NO: 1227 | PTIIFPLPSAPAVV |
| SEQ ID NO: 1228 | TIIFPLPSAPAVVI |
| SEQ ID NO: 1229 | IIFPLPSAPAVVIH |
| SEQ ID NO: 1230 | IFPLPSAPAVVIHT |
| SEQ ID NO: 1231 | FPLPSAPAVVIHTL |
| SEQ ID NO: 1232 | PLPSAPAVVIHTLD |
| SEQ ID NO: 1233 | LPSAPAVVIHTLDK |
| SEQ ID NO: 1234 | PSAPAVVIHTLDKS |
| SEQ ID NO: 1235 | PTERPTIIFPLPSAP |
| SEQ ID NO: 1236 | TERPTIIFPLPSAPA |
| SEQ ID NO: 1237 | ERPTIIFPLPSAPAV |
| SEQ ID NO: 1238 | RPTIIFPLPSAPAVV |
| SEQ ID NO: 1239 | PTIIFPLPSAPAVVI |
| SEQ ID NO: 1240 | TIIFPLPSAPAVVIH |
| SEQ ID NO: 1241 | IIFPLPSAPAVVIHT |
| SEQ ID NO: 1242 | IFPLPSAPAVVIHTL |
| SEQ ID NO: 1243 | FPLPSAPAVVIHTLD |
| SEQ ID NO: 1244 | PLPSAPAVVIHTLDK |
| SEQ ID NO: 1245 | LPSAPAVVIHTLDKS |
| SEQ ID NO: 1246 | PSAPAVVIHTLDKSF |
| SEQ ID NO: 1247 | GPTERPTIIFPLPSAP |
| SEQ ID NO: 1248 | PTERPTIIFPLPSAPA |
| SEQ ID NO: 1249 | TERPTIIFPLPSAPAV |
| SEQ ID NO: 1250 | ERPTIIFPLPSAPAVV |
| SEQ ID NO: 1251 | RPTIIFPLPSAPAVVI |
| SEQ ID NO: 1252 | PTIIFPLPSAPAVVIH |
| SEQ ID NO: 1253 | TIIFPLPSAPAVVIHT |
| SEQ ID NO: 1254 | IIFPLPSAPAVVIHTL |
| SEQ ID NO: 1255 | IFPLPSAPAVVIHTLD |
| SEQ ID NO: 1256 | FPLPSAPAVVIHTLDK |
| SEQ ID NO: 1257 | PLPSAPAVVIHTLDKS |
| SEQ ID NO: 1258 | LPSAPAVVIHTLDKSF |
| SEQ ID NO: 1259 | PSAPAVVIHTLDKSFD |
| SEQ ID NO: 1260 | PGPTERPTIIFPLPSAP |
| SEQ ID NO: 1261 | GPTERPTIIFPLPSAPA |
| SEQ ID NO: 1262 | PTERPTIIFPLPSAPAV |
| SEQ ID NO: 1263 | TERPTIIFPLPSAPAVV |
| SEQ ID NO: 1264 | ERPTIIFPLPSAPAVVI |
| SEQ ID NO: 1265 | RPTIIFPLPSAPAVVIH |
| SEQ ID NO: 1266 | PTIIFPLPSAPAVVIHT |
| SEQ ID NO: 1267 | TIIFPLPSAPAVVIHTL |
| SEQ ID NO: 1268 | IIFPLPSAPAVVIHTLD |
| SEQ ID NO: 1269 | IFPLPSAPAVVIHTLDK |
| SEQ ID NO: 1270 | FPLPSAPAVVIHTLDKS |
| SEQ ID NO: 1271 | PLPSAPAVVIHTLDKSF |
| SEQ ID NO: 1272 | LPSAPAVVIHTLDKSFD |
| SEQ ID NO: 1273 | PSAPAVVIHTLDKSFDY |
| SEQ ID NO: 1274 | YPGPTERPTIIFPLPSAP |
| SEQ ID NO: 1275 | PGPTERPTIIFPLPSAPA |
| SEQ ID NO: 1276 | GPTERPTIIFPLPSAPAV |
| SEQ ID NO: 1277 | PTERPTIIFPLPSAPAVV |
| SEQ ID NO: 1278 | TERPTIIFPLPSAPAVVI |
| SEQ ID NO: 1279 | ERPTIIFPLPSAPAVVIH |
| SEQ ID NO: 1280 | RPTIIFPLPSAPAVVIHT |
| SEQ ID NO: 1281 | PTIIFPLPSAPAVVIHTL |
| SEQ ID NO: 1282 | TIIFPLPSAPAVVIHTLD |
| SEQ ID NO: 1283 | IIFPLPSAPAVVIHTLDK |
| SEQ ID NO: 1284 | IFPLPSAPAVVIHTLDKS |
| SEQ ID NO: 1285 | FPLPSAPAVVIHTLDKSF |
| SEQ ID NO: 1286 | PLPSAPAVVIHTLDKSFD |
| SEQ ID NO: 1287 | LPSAPAVVIHTLDKSFDY |
| SEQ ID NO: 1288 | PSAPAVVIHTLDKSFDYY |
| SEQ ID NO: 1289 | IYPGPTERPTIIFPLPSAP |
| SEQ ID NO: 1290 | YPGPTERPTIIFPLPSAPA |
| SEQ ID NO: 1291 | PGPTERPTIIFPLPSAPAV |
| SEQ ID NO: 1292 | GPTERPTIIFPLPSAPAVV |
| SEQ ID NO: 1293 | PTERPTIIFPLPSAPAVVI |
| SEQ ID NO: 1294 | TERPTIIFPLPSAPAVVIH |
| SEQ ID NO: 1295 | ERPTIIFPLPSAPAVVIHT |
| SEQ ID NO: 1296 | RPTIIFPLPSAPAVVIHTL |
| SEQ ID NO: 1297 | PTIIFPLPSAPAVVIHTLD |
| SEQ ID NO: 1298 | TIIFPLPSAPAVVIHTLDK |
| SEQ ID NO: 1299 | IIFPLPSAPAVVIHTLDKS |
| SEQ ID NO: 1300 | IFPLPSAPAVVIHTLDKSF |
| SEQ ID NO: 1301 | FPLPSAPAVVIHTLDKSFD |
| SEQ ID NO: 1302 | PLPSAPAVVIHTLDKSFDY |
| SEQ ID NO: 1303 | LPSAPAVVIHTLDKSFDYY |
| SEQ ID NO: 1304 | PSAPAVVIHTLDKSFDYYL |
| SEQ ID NO: 1305 | VIYPGPTERPTIIFPLPSAP |
| SEQ ID NO: 1306 | IYPGPTERPTIIFPLPSAPA |
| SEQ ID NO: 1307 | YPGPTERPTIIFPLPSAPAV |
| SEQ ID NO: 1308 | PGPTERPTIIFPLPSAPAVV |
| SEQ ID NO: 1309 | GPTERPTIIFPLPSAPAVVI |
| SEQ ID NO: 1310 | PTERPTIIFPLPSAPAVVIH |
| SEQ ID NO: 1311 | TERPTIIFPLPSAPAVVIHT |
| SEQ ID NO: 1312 | ERPTIIFPLPSAPAVVIHTL |
| SEQ ID NO: 1313 | RPTIIFPLPSAPAVVIHTLD |
| SEQ ID NO: 1314 | PTIIFPLPSAPAVVIHTLDK |
| SEQ ID NO: 1315 | TIIFPLPSAPAVVIHTLDKS |
| SEQ ID NO: 1316 | IIFPLPSAPAVVIHTLDKSF |
| SEQ ID NO: 1317 | IFPLPSAPAVVIHTLDKSFD |
| SEQ ID NO: 1318 | FPLPSAPAVVIHTLDKSFDY |
| SEQ ID NO: 1319 | PLPSAPAVVIHTLDKSFDYY |
| SEQ ID NO: 1320 | LPSAPAVVIHTLDKSFDYYL |
| SEQ ID NO: 1321 | PSAPAVVIHTLDKSFDYYLH |

TABLE 11
P(T/S)AP Motif Containing Peptides from Human
Papillomavrius Type 35 Major Capsid Protein L1
(GenBank Accession No. P27232)

| | |
|---|---|
| SEQ ID NO: 1322 | TCQKPSAP |
| SEQ ID NO: 1323 | CQKPSAPK |
| SEQ ID NO: 1324 | QKPSAPKP |
| SEQ ID NO: 1325 | KPSAPKPK |
| SEQ ID NO: 1326 | PSAPKPKD |
| SEQ ID NO: 1327 | VTCQKPSAP |
| SEQ ID NO: 1328 | TCQKPSAPK |
| SEQ ID NO: 1329 | CQKPSAPKP |
| SEQ ID NO: 1330 | QKPSAPKPK |
| SEQ ID NO: 1331 | KPSAPKPKD |
| SEQ ID NO: 1332 | PSAPKPKDD |
| SEQ ID NO: 1333 | AVTCQKPSAP |
| SEQ ID NO: 1334 | VTCQKPSAPK |
| SEQ ID NO: 1335 | TCQKPSAPKP |
| SEQ ID NO: 1336 | CQKPSAPKPK |
| SEQ ID NO: 1337 | QKPSAPKPKD |
| SEQ ID NO: 1338 | KPSAPKPKDD |
| SEQ ID NO: 1339 | PSAPKPKDDP |
| SEQ ID NO: 1340 | QAVTCQKPSAP |
| SEQ ID NO: 1341 | AVTCQKPSAPK |
| SEQ ID NO: 1342 | VTCQKPSAPKP |
| SEQ ID NO: 1343 | TCQKPSAPKPK |
| SEQ ID NO: 1344 | CQKPSAPKPKD |
| SEQ ID NO: 1345 | QKPSAPKPKDD |
| SEQ ID NO: 1346 | KPSAPKPKDDP |
| SEQ ID NO: 1347 | PSAPKPKDDPL |
| SEQ ID NO: 1348 | SQAVTCQKPSAP |
| SEQ ID NO: 1349 | QAVTCQKPSAPK |
| SEQ ID NO: 1350 | AVTCQKPSAPKP |
| SEQ ID NO: 1351 | VTCQKPSAPKPK |
| SEQ ID NO: 1352 | TCQKPSAPKPKD |
| SEQ ID NO: 1353 | CQKPSAPKPKDD |
| SEQ ID NO: 1354 | QKPSAPKPKDDP |
| SEQ ID NO: 1355 | KPSAPKPKDDPL |
| SEQ ID NO: 1356 | PSAPKPKDDPLK |
| SEQ ID NO: 1357 | TSQAVTCQKPSAP |
| SEQ ID NO: 1358 | SQAVTCQKPSAPK |
| SEQ ID NO: 1359 | QAVTCQKPSAPKP |
| SEQ ID NO: 1360 | AVTCQKPSAPKPK |
| SEQ ID NO: 1361 | VTCQKPSAPKPKD |
| SEQ ID NO: 1362 | TCQKPSAPKPKDD |
| SEQ ID NO: 1363 | CQKPSAPKPKDDP |
| SEQ ID NO: 1364 | QKPSAPKPKDDPL |
| SEQ ID NO: 1365 | KPSAPKPKDDPLK |
| SEQ ID NO: 1366 | PSAPKPKDDPLKN |
| SEQ ID NO: 1367 | VTSQAVTCQKPSAP |
| SEQ ID NO: 1368 | TSQAVTCQKPSAPK |
| SEQ ID NO: 1369 | SQAVTCQKPSAPKP |
| SEQ ID NO: 1370 | QAVTCQKPSAPKPK |
| SEQ ID NO: 1371 | AVTCQKPSAPKPKD |
| SEQ ID NO: 1372 | VTCQKPSAPKPKDD |
| SEQ ID NO: 1373 | TCQKPSAPKPKDDP |
| SEQ ID NO: 1374 | CQKPSAPKPKDDPL |
| SEQ ID NO: 1375 | QKPSAPKPKDDPLK |
| SEQ ID NO: 1376 | KPSAPKPKDDPLKN |
| SEQ ID NO: 1377 | PSAPKPKDDPLKNY |
| SEQ ID NO: 1378 | YVTSQAVTCQKPSAP |
| SEQ ID NO: 1379 | VTSQAVTCQKPSAPK |
| SEQ ID NO: 1380 | TSQAVTCQKPSAPKP |
| SEQ ID NO: 1381 | SQAVTCQKPSAPKPK |
| SEQ ID NO: 1382 | QAVTCQKPSAPKPKD |
| SEQ ID NO: 1383 | AVTCQKPSAPKPKDD |
| SEQ ID NO: 1384 | VTCQKPSAPKPKDDP |
| SEQ ID NO: 1385 | TCQKPSAPKPKDDPL |
| SEQ ID NO: 1386 | CQKPSAPKPKDDPLK |
| SEQ ID NO: 1387 | QKPSAPKPKDDPLKN |
| SEQ ID NO: 1388 | KPSAPKPKDDPLKNY |
| SEQ ID NO: 1389 | PSAPKPKDDPLKNYT |
| SEQ ID NO: 1390 | RYVTSQAVTCQKPSAP |
| SEQ ID NO: 1391 | YVTSQAVTCQKPSAPK |
| SEQ ID NO: 1392 | VTSQAVTCQKPSAPKP |
| SEQ ID NO: 1393 | TSQAVTCQKPSAPKPK |
| SEQ ID NO: 1394 | SQAVTCQKPSAPKPKD |
| SEQ ID NO: 1395 | QAVTCQKPSAPKPKDD |
| SEQ ID NO: 1396 | AVTCQKPSAPKPKDDP |
| SEQ ID NO: 1397 | VTCQKPSAPKPKDDPL |
| SEQ ID NO: 1398 | TCQKPSAPKPKDDPLK |
| SEQ ID NO: 1399 | CQKPSAPKPKDDPLKN |
| SEQ ID NO: 1400 | QKPSAPKPKDDPLKNY |
| SEQ ID NO: 1401 | KPSAPKPKDDPLKNYT |
| SEQ ID NO: 1402 | PSAPKPKDDPLKNYTF |
| SEQ ID NO: 1403 | YRYVTSQAVTCQKPSAP |
| SEQ ID NO: 1404 | RYVTSQAVTCQKPSAPK |
| SEQ ID NO: 1405 | YVTSQAVTCQKPSAPKP |
| SEQ ID NO: 1406 | VTSQAVTCQKPSAPKPK |
| SEQ ID NO: 1407 | TSQAVTCQKPSAPKPKD |
| SEQ ID NO: 1408 | SQAVTCQKPSAPKPKDD |
| SEQ ID NO: 1409 | QAVTCQKPSAPKPKDDP |
| SEQ ID NO: 1410 | AVTCQKPSAPKPKDDPL |
| SEQ ID NO: 1411 | VTCQKPSAPKPKDDPLK |
| SEQ ID NO: 1412 | TCQKPSAPKPKDDPLKN |
| SEQ ID NO: 1413 | CQKPSAPKPKDDPLKNY |
| SEQ ID NO: 1414 | QKPSAPKPKDDPLKNYT |
| SEQ ID NO: 1415 | KPSAPKPKDDPLKNYTF |
| SEQ ID NO: 1416 | PSAPKPKDDPLKNYTFW |
| SEQ ID NO: 1417 | TYRYVTSQAVTCQKPSAP |
| SEQ ID NO: 1418 | YRYVTSQAVTCQKPSAPK |
| SEQ ID NO: 1419 | RYVTSQAVTCQKPSAPKP |
| SEQ ID NO: 1420 | YVTSQAVTCQKPSAPKPK |
| SEQ ID NO: 1421 | VTSQAVTCQKPSAPKPKD |
| SEQ ID NO: 1422 | TSQAVTCQKPSAPKPKDD |
| SEQ ID NO: 1423 | SQAVTCQKPSAPKPKDDP |
| SEQ ID NO: 1424 | QAVTCQKPSAPKPKDDPL |
| SEQ ID NO: 1425 | AVTCQKPSAPKPKDDPLK |
| SEQ ID NO: 1426 | VTCQKPSAPKPKDDPLKN |
| SEQ ID NO: 1427 | TCQKPSAPKPKDDPLKNY |
| SEQ ID NO: 1428 | CQKPSAPKPKDDPLKNYT |
| SEQ ID NO: 1429 | QKPSAPKPKDDPLKNYTF |
| SEQ ID NO: 1430 | KPSAPKPKDDPLKNYTFW |
| SEQ ID NO: 1431 | PSAPKPKDDPLKNYTFWE |
| SEQ ID NO: 1432 | DTYRYVTSQAVTCQKPSAP |
| SEQ ID NO: 1433 | TYRYVTSQAVTCQKPSAPK |
| SEQ ID NO: 1434 | YRYVTSQAVTCQKPSAPKP |
| SEQ ID NO: 1435 | RYVTSQAVTCQKPSAPKPK |
| SEQ ID NO: 1436 | YVTSQAVTCQKPSAPKPKD |
| SEQ ID NO: 1437 | VTSQAVTCQKPSAPKPKDD |
| SEQ ID NO: 1438 | TSQAVTCQKPSAPKPKDDP |
| SEQ ID NO: 1439 | SQAVTCQKPSAPKPKDDPL |
| SEQ ID NO: 1440 | QAVTCQKPSAPKPKDDPLK |
| SEQ ID NO: 1441 | AVTCQKPSAPKPKDDPLKN |
| SEQ ID NO: 1442 | VTCQKPSAPKPKDDPLKNY |
| SEQ ID NO: 1443 | TCQKPSAPKPKDDPLKNYT |
| SEQ ID NO: 1444 | CQKPSAPKPKDDPLKNYTF |
| SEQ ID NO: 1445 | QKPSAPKPKDDPLKNYTFW |
| SEQ ID NO: 1446 | KPSAPKPKDDPLKNYTFWE |
| SEQ ID NO: 1447 | PSAPKPKDDPLKNYTFWEV |
| SEQ ID NO: 1448 | EDTYRYVTSQAVTCQKPSAP |
| SEQ ID NO: 1449 | DTYRYVTSQAVTCQKPSAPK |
| SEQ ID NO: 1450 | TYRYVTSQAVTCQKPSAPKP |
| SEQ ID NO: 1451 | YRYVTSQAVTCQKPSAPKPK |
| SEQ ID NO: 1452 | RYVTSQAVTCQKPSAPKPKD |
| SEQ ID NO: 1453 | YVTSQAVTCQKPSAPKPKDD |
| SEQ ID NO: 1454 | VTSQAVTCQKPSAPKPKDDP |
| SEQ ID NO: 1455 | TSQAVTCQKPSAPKPKDDPL |
| SEQ ID NO: 1456 | SQAVTCQKPSAPKPKDDPLK |
| SEQ ID NO: 1457 | QAVTCQKPSAPKPKDDPLKN |
| SEQ ID NO: 1458 | AVTCQKPSAPKPKDDPLKNY |
| SEQ ID NO: 1459 | VTCQKPSAPKPKDDPLKNYT |
| SEQ ID NO: 1460 | TCQKPSAPKPKDDPLKNYTF |
| SEQ ID NO: 1461 | CQKPSAPKPKDDPLKNYTFW |
| SEQ ID NO: 1462 | QKPSAPKPKDDPLKNYTFWE |
| SEQ ID NO: 1463 | KPSAPKPKDDPLKNYTFWEV |
| SEQ ID NO: 1464 | PSAPKPKDDPLKNYTFWEVD |

TABLE 12
P(T/S)AP Motif Containing Peptides from Human
Papillomavrius Type 6b Minor Capsid Protein L2
(GenBank Accession No. NP_040303)

| | |
|---|---|
| SEQ ID NO: 1465 | DITFPTAP |
| SEQ ID NO: 1466 | ITFPTAPM |
| SEQ ID NO: 1467 | TFPTAPMG |
| SEQ ID NO: 1468 | FPTAPMGT |
| SEQ ID NO: 1469 | PTAPMGTP |
| SEQ ID NO: 1470 | PDITFPTAP |
| SEQ ID NO: 1471 | DITFPTAPM |
| SEQ ID NO: 1472 | ITFPTAPMG |
| SEQ ID NO: 1473 | TFPTAPMGT |
| SEQ ID NO: 1474 | FPTAPMGTP |
| SEQ ID NO: 1475 | PTAPMGTPF |
| SEQ ID NO: 1476 | GPDITFPTAP |
| SEQ ID NO: 1477 | PDITFPTAPM |
| SEQ ID NO: 1478 | DITFPTAPMG |
| SEQ ID NO: 1479 | ITFPTAPMGT |
| SEQ ID NO: 1480 | TFPTAPMGTP |
| SEQ ID NO: 1481 | FPTAPMGTPF |
| SEQ ID NO: 1482 | PTAPMGTPFS |
| SEQ ID NO: 1483 | SGPDITFPTAP |
| SEQ ID NO: 1484 | GPDITFPTAPM |
| SEQ ID NO: 1485 | PDITFPTAPMG |
| SEQ ID NO: 1486 | DITFPTAPMGT |
| SEQ ID NO: 1487 | ITFPTAPMGTP |
| SEQ ID NO: 1488 | TFPTAPMGTPF |
| SEQ ID NO: 1489 | FPTAPMGTPFS |
| SEQ ID NO: 1490 | PTAPMGTPFSP |
| SEQ ID NO: 1491 | QSGPDITFPTAP |
| SEQ ID NO: 1492 | SGPDITFPTAPM |
| SEQ ID NO: 1493 | GPDITFPTAPMG |
| SEQ ID NO: 1494 | PDITFPTAPMGT |
| SEQ ID NO: 1495 | DITFPTAPMGTP |
| SEQ ID NO: 1496 | ITFPTAPMGTPF |
| SEQ ID NO: 1497 | TFPTAPMGTPFS |
| SEQ ID NO: 1498 | FPTAPMGTPFSP |
| SEQ ID NO: 1499 | PTAPMGTPFSPV |
| SEQ ID NO: 1500 | LQSGPDITFPTAP |
| SEQ ID NO: 1501 | QSGPDITFPTAPM |
| SEQ ID NO: 1502 | SGPDITFPTAPMG |
| SEQ ID NO: 1503 | GPDITFPTAPMGT |
| SEQ ID NO: 1504 | PDITFPTAPMGTP |
| SEQ ID NO: 1505 | DITFPTAPMGTPF |
| SEQ ID NO: 1506 | ITFPTAPMGTPFS |
| SEQ ID NO: 1507 | TFPTAPMGTPFSP |
| SEQ ID NO: 1508 | FPTAPMGTPFSPV |
| SEQ ID NO: 1509 | PTAPMGTPFSPVT |
| SEQ ID NO: 1510 | PLQSGPDITFPTAP |
| SEQ ID NO: 1511 | LQSGPDITFPTAPM |
| SEQ ID NO: 1512 | QSGPDITFPTAPMG |
| SEQ ID NO: 1513 | SGPDITFPTAPMGT |
| SEQ ID NO: 1514 | GPDITFPTAPMGTP |
| SEQ ID NO: 1515 | PDITFPTAPMGTPF |
| SEQ ID NO: 1516 | DITFPTAPMGTPFS |
| SEQ ID NO: 1517 | ITFPTAPMGTPFSP |
| SEQ ID NO: 1518 | TFPTAPMGTPFSPV |
| SEQ ID NO: 1519 | FPTAPMGTPFSPVT |
| SEQ ID NO: 1520 | PTAPMGTPFSPVTP |
| SEQ ID NO: 1521 | LFLQSGPDITFPTAP |
| SEQ ID NO: 1522 | FLQSGPDITFPTAPM |
| SEQ ID NO: 1523 | LQSGPDITFPTAPMG |
| SEQ ID NO: 1524 | QSGPDITFPTAPMGT |
| SEQ ID NO: 1525 | SGPDITFPTAPMGTP |
| SEQ ID NO: 1526 | GPDITFPTAPMGTPF |
| SEQ ID NO: 1527 | PDITFPTAPMGTPFS |
| SEQ ID NO: 1528 | DITFPTAPMGTPFSP |
| SEQ ID NO: 1529 | ITFPTAPMGTPFSPV |
| SEQ ID NO: 1530 | TFPTAPMGTPFSPVT |
| SEQ ID NO: 1531 | FPTAPMGTPFSPVTP |
| SEQ ID NO: 1532 | PTAPMGTPFSPVTPA |
| SEQ ID NO: 1533 | DLFLQSGPDITFPTAP |
| SEQ ID NO: 1534 | LFLQSGPDITFPTAPM |
| SEQ ID NO: 1535 | FLQSGPDITFPTAPMG |
| SEQ ID NO: 1536 | LQSGPDITFPTAPMGT |
| SEQ ID NO: 1537 | QSGPDITFPTAPMGTP |
| SEQ ID NO: 1538 | SGPDITFPTAPMGTPF |
| SEQ ID NO: 1539 | GPDITFPTAPMGTPFS |
| SEQ ID NO: 1540 | PDITFPTAPMGTPFSP |
| SEQ ID NO: 1541 | DITFPTAPMGTPFSPV |
| SEQ ID NO: 1542 | ITFPTAPMGTPFSPVT |
| SEQ ID NO: 1543 | TFPTAPMGTPFSPVTP |
| SEQ ID NO: 1544 | FPTAPMGTPFSPVTPA |
| SEQ ID NO: 1545 | PTAPMGTPFSPVTPAL |
| SEQ ID NO: 1546 | NDLFLQSGPDITFPTAP |
| SEQ ID NO: 1547 | DLFLQSGPDITFPTAPM |
| SEQ ID NO: 1548 | LFLQSGPDITFPTAPMG |
| SEQ ID NO: 1549 | FLQSGPDITFPTAPMGT |
| SEQ ID NO: 1550 | LQSGPDITFPTAPMGTP |
| SEQ ID NO: 1551 | QSGPDITFPTAPMGTPF |
| SEQ ID NO: 1552 | SGPDITFPTAPMGTPFS |
| SEQ ID NO: 1553 | GPDITFPTAPMGTPFSP |
| SEQ ID NO: 1554 | PDITFPTAPMGTPFSPV |
| SEQ ID NO: 1555 | DITFPTAPMGTPFSPVT |
| SEQ ID NO: 1556 | ITFPTAPMGTPFSPVTP |
| SEQ ID NO: 1557 | TFPTAPMGTPFSPVTPA |
| SEQ ID NO: 1558 | FPTAPMGTPFSPVTPAL |
| SEQ ID NO: 1559 | PTAPMGTPFSPVTPALP |
| SEQ ID NO: 1560 | PNDLFLQSGPDITFPTAP |
| SEQ ID NO: 1561 | NDLFLQSGPDITFPTAPM |
| SEQ ID NO: 1562 | DLFLQSGPDITFPTAPMG |
| SEQ ID NO: 1563 | LFLQSGPDITFPTAPMGT |
| SEQ ID NO: 1564 | FLQSGPDITFPTAPMGTP |
| SEQ ID NO: 1565 | LQSGPDITFPTAPMGTPF |
| SEQ ID NO: 1566 | QSGPDITFPTAPMGTPFS |
| SEQ ID NO: 1567 | SGPDITFPTAPMGTPFSP |
| SEQ ID NO: 1568 | GPDITFPTAPMGTPFSPV |
| SEQ ID NO: 1569 | PDITFPTAPMGTPFSPVT |
| SEQ ID NO: 1570 | DITFPTAPMGTPFSPVTP |
| SEQ ID NO: 1571 | ITFPTAPMGTPFSPVTPA |
| SEQ ID NO: 1572 | TFPTAPMGTPFSPVTPAL |
| SEQ ID NO: 1573 | FPTAPMGTPFSPVTPALP |
| SEQ ID NO: 1574 | PTAPMGTPFSPVTPALPT |
| SEQ ID NO: 1575 | LPNDLFLQSGPDITFPTAP |
| SEQ ID NO: 1576 | PNDLFLQSGPDITFPTAPM |
| SEQ ID NO: 1577 | NDLFLQSGPDITFPTAPMG |
| SEQ ID NO: 1578 | DLFLQSGPDITFPTAPMGT |
| SEQ ID NO: 1579 | LFLQSGPDITFPTAPMGTP |
| SEQ ID NO: 1580 | FLQSGPDITFPTAPMGTPF |
| SEQ ID NO: 1581 | LQSGPDITFPTAPMGTPFS |
| SEQ ID NO: 1582 | QSGPDITFPTAPMGTPFSP |
| SEQ ID NO: 1583 | SGPDITFPTAPMGTPFSPV |
| SEQ ID NO: 1584 | GPDITFPTAPMGTPFSPVT |
| SEQ ID NO: 1585 | PDITFPTAPMGTPFSPVTP |
| SEQ ID NO: 1586 | DITFPTAPMGTPFSPVTPA |
| SEQ ID NO: 1587 | ITFPTAPMGTPFSPVTPAL |
| SEQ ID NO: 1588 | TFPTAPMGTPFSPVTPALP |
| SEQ ID NO: 1589 | FPTAPMGTPFSPVTPALPT |
| SEQ ID NO: 1590 | PTAPMGTPFSPVTPALPTG |
| SEQ ID NO: 1591 | SLPNDLFLQSGPDITFPTAP |
| SEQ ID NO: 1592 | LPNDLFLQSGPDITFPTAPM |
| SEQ ID NO: 1593 | PNDLFLQSGPDITFPTAPMG |
| SEQ ID NO: 1594 | NDLFLQSGPDITFPTAPMGT |
| SEQ ID NO: 1595 | DLFLQSGPDITFPTAPMGTP |
| SEQ ID NO: 1596 | LFLQSGPDITFPTAPMGTPF |
| SEQ ID NO: 1597 | FLQSGPDITFPTAPMGTPFS |
| SEQ ID NO: 1598 | LQSGPDITFPTAPMGTPFSP |
| SEQ ID NO: 1599 | QSGPDITFPTAPMGTPFSPV |
| SEQ ID NO: 1600 | SGPDITFPTAPMGTPFSPVT |
| SEQ ID NO: 1601 | GPDITFPTAPMGTPFSPVTP |
| SEQ ID NO: 1602 | PDITFPTAPMGTPFSPVTPA |
| SEQ ID NO: 1603 | DITFPTAPMGTPFSPVTPAL |
| SEQ ID NO: 1604 | ITFPTAPMGTPFSPVTPALP |
| SEQ ID NO: 1605 | TFPTAPMGTPFSPVTPALPT |
| SEQ ID NO: 1606 | FPTAPMGTPFSPVTPALPTG |
| SEQ ID NO: 1607 | PTAPMGTPFSPVTPALPTGP |

TABLE 13
P(T/S)AP Motif Containing Peptides from
Human Papillomavirus Type 9 Late Protein
(GenBank Accession No. NP_041865)

| | |
|---|---|
| SEQ ID NO: 1608 | RPIDPTAP |
| SEQ ID NO: 1609 | PIDPTAPS |
| SEQ ID NO: 1610 | IDPTAPSI |
| SEQ ID NO: 1611 | DPTAPSIV |
| SEQ ID NO: 1612 | PTAPSIVT |
| SEQ ID NO: 1613 | VRPIDPTAP |
| SEQ ID NO: 1614 | RPIDPTAPS |
| SEQ ID NO: 1615 | PIDPTAPSI |
| SEQ ID NO: 1616 | IDPTAPSIV |
| SEQ ID NO: 1617 | DPTAPSIVT |
| SEQ ID NO: 1618 | PTAPSIVTG |
| SEQ ID NO: 1619 | TVRPIDPTAP |
| SEQ ID NO: 1620 | VRPIDPTAPS |
| SEQ ID NO: 1621 | RPIDPTAPSI |
| SEQ ID NO: 1622 | PIDPTAPSIV |
| SEQ ID NO: 1623 | IDPTAPSIVT |
| SEQ ID NO: 1624 | DPTAPSIVTG |
| SEQ ID NO: 1625 | PTAPSIVTGT |
| SEQ ID NO: 1626 | DTVRPIDPTAP |
| SEQ ID NO: 1627 | TVRPIDPTAPS |
| SEQ ID NO: 1628 | VRPIDPTAPSI |
| SEQ ID NO: 1629 | RPIDPTAPSIV |
| SEQ ID NO: 1630 | PIDPTAPSIVT |
| SEQ ID NO: 1631 | IDPTAPSIVTG |
| SEQ ID NO: 1632 | DPTAPSIVTGT |
| SEQ ID NO: 1633 | PTAPSIVTGTD |
| SEQ ID NO: 1634 | LDTVRPIDPTAP |
| SEQ ID NO: 1635 | DTVRPIDPTAPS |
| SEQ ID NO: 1636 | TVRPIDPTAPSI |
| SEQ ID NO: 1637 | VRPIDPTAPSIV |
| SEQ ID NO: 1638 | RPIDPTAPSIVT |
| SEQ ID NO: 1639 | PIDPTAPSIVTG |
| SEQ ID NO: 1640 | IDPTAPSIVTGT |
| SEQ ID NO: 1641 | DPTAPSIVTGTD |
| SEQ ID NO: 1642 | PTAPSIVTGTDS |
| SEQ ID NO: 1643 | PLDTVRPIDPTAP |
| SEQ ID NO: 1644 | LDTVRPIDPTAPS |
| SEQ ID NO: 1645 | DTVRPIDPTAPSI |
| SEQ ID NO: 1646 | TVRPIDPTAPSIV |
| SEQ ID NO: 1647 | VRPIDPTAPSIVT |
| SEQ ID NO: 1648 | RPIDPTAPSIVTG |
| SEQ ID NO: 1649 | PIDPTAPSIVTGT |
| SEQ ID NO: 1650 | IDPTAPSIVTGTD |
| SEQ ID NO: 1651 | DPTAPSIVTGTDS |
| SEQ ID NO: 1652 | PTAPSIVTGTDST |
| SEQ ID NO: 1653 | IPLDTVRPIDPTAP |
| SEQ ID NO: 1654 | PLDTVRPIDPTAPS |
| SEQ ID NO: 1655 | LDTVRPIDPTAPSI |
| SEQ ID NO: 1656 | DTVRPIDPTAPSIV |
| SEQ ID NO: 1657 | TVRPIDPTAPSIVT |
| SEQ ID NO: 1658 | VRPIDPTAPSIVTG |
| SEQ ID NO: 1659 | RPIDPTAPSIVTGT |
| SEQ ID NO: 1660 | PIDPTAPSIVTGTD |
| SEQ ID NO: 1661 | IDPTAPSIVTGTDS |
| SEQ ID NO: 1662 | DPTAPSIVTGTDST |
| SEQ ID NO: 1663 | PTAPSIVTGTDSTV |
| SEQ ID NO: 1664 | LIPLDTVRPIDPTAP |
| SEQ ID NO: 1665 | IPLDTVRPIDPTAPS |
| SEQ ID NO: 1666 | PLDTVRPIDPTAPSI |
| SEQ ID NO: 1667 | LDTVRPIDPTAPSIV |
| SEQ ID NO: 1668 | DTVRPIDPTAPSIVT |
| SEQ ID NO: 1669 | TVRPIDPTAPSIVTG |
| SEQ ID NO: 1670 | VRPIDPTAPSIVTGT |
| SEQ ID NO: 1671 | RPIDPTAPSIVTGTD |
| SEQ ID NO: 1672 | PIDPTAPSIVTGTDS |
| SEQ ID NO: 1673 | IDPTAPSIVTGTDST |
| SEQ ID NO: 1674 | DPTAPSIVTGTDSTV |
| SEQ ID NO: 1675 | PTAPSIVTGTDSTVD |
| SEQ ID NO: 1676 | DLIPLDTVRPIDPTAP |
| SEQ ID NO: 1677 | LIPLDTVRPIDPTAPS |
| SEQ ID NO: 1678 | IPLDTVRPIDPTAPSI |
| SEQ ID NO: 1679 | PLDTVRPIDPTAPSIV |
| SEQ ID NO: 1680 | LDTVRPIDPTAPSIVT |
| SEQ ID NO: 1681 | DTVRPIDPTAPSIVTG |
| SEQ ID NO: 1682 | TVRPIDPTAPSIVTGT |
| SEQ ID NO: 1683 | VRPIDPTAPSIVTGTD |
| SEQ ID NO: 1684 | RPIDPTAPSIVTGTDS |
| SEQ ID NO: 1685 | PIDPTAPSIVTGTDST |
| SEQ ID NO: 1686 | IDPTAPSIVTGTDSTV |
| SEQ ID NO: 1687 | DPTAPSIVTGTDSTVD |
| SEQ ID NO: 1688 | PTAPSIVTGTDSTVDL |
| SEQ ID NO: 1689 | TDLIPLDTVRPIDPTAP |
| SEQ ID NO: 1690 | DLIPLDTVRPIDPTAPS |
| SEQ ID NO: 1691 | LIPLDTVRPIDPTAPSI |
| SEQ ID NO: 1692 | IPLDTVRPIDPTAPSIV |
| SEQ ID NO: 1693 | PLDTVRPIDPTAPSIVT |
| SEQ ID NO: 1694 | LDTVRPIDPTAPSIVTG |
| SEQ ID NO: 1695 | DTVRPIDPTAPSIVTGT |
| SEQ ID NO: 1696 | TVRPIDPTAPSIVTGTD |
| SEQ ID NO: 1697 | VRPIDPTAPSIVTGTDS |
| SEQ ID NO: 1698 | RPIDPTAPSIVTGTDST |
| SEQ ID NO: 1699 | PIDPTAPSIVTGTDSTV |
| SEQ ID NO: 1700 | IDPTAPSIVTGTDSTVD |
| SEQ ID NO: 1701 | DPTAPSIVTGTDSTVDL |
| SEQ ID NO: 1702 | PTAPSIVTGTDSTVDLL |
| SEQ ID NO: 1703 | PTDLIPLDTVRPIDPTAP |
| SEQ ID NO: 1704 | TDLIPLDTVRPIDPTAPS |
| SEQ ID NO: 1705 | DLIPLDTVRPIDPTAPSI |
| SEQ ID NO: 1706 | LIPLDTVRPIDPTAPSIV |
| SEQ ID NO: 1707 | IPLDTVRPIDPTAPSIVT |
| SEQ ID NO: 1708 | PLDTVRPIDPTAPSIVTG |
| SEQ ID NO: 1709 | LDTVRPIDPTAPSIVTGT |
| SEQ ID NO: 1710 | DTVRPIDPTAPSIVTGTD |
| SEQ ID NO: 1711 | TVRPIDPTAPSIVTGTDS |
| SEQ ID NO: 1712 | VRPIDPTAPSIVTGTDST |
| SEQ ID NO: 1713 | RPIDPTAPSIVTGTDSTV |
| SEQ ID NO: 1714 | PIDPTAPSIVTGTDSTVD |
| SEQ ID NO: 1715 | IDPTAPSIVTGTDSTVDL |
| SEQ ID NO: 1716 | DPTAPSIVTGTDSTVDLL |
| SEQ ID NO: 1717 | PTAPSIVTGTDSTVDLLP |
| SEQ ID NO: 1718 | GPTDLIPLDTVRPIDPTAP |
| SEQ ID NO: 1719 | PTDLIPLDTVRPIDPTAPS |
| SEQ ID NO: 1720 | TDLIPLDTVRPIDPTAPSI |
| SEQ ID NO: 1721 | DLIPLDTVRPIDPTAPSIV |
| SEQ ID NO: 1722 | LIPLDTVRPIDPTAPSIVT |
| SEQ ID NO: 1723 | IPLDTVRPIDPTAPSIVTG |
| SEQ ID NO: 1724 | PLDTVRPIDPTAPSIVTGT |
| SEQ ID NO: 1725 | LDTVRPIDPTAPSIVTGTD |
| SEQ ID NO: 1726 | DTVRPIDPTAPSIVTGTDS |
| SEQ ID NO: 1727 | TVRPIDPTAPSIVTGTDST |
| SEQ ID NO: 1728 | VRPIDPTAPSIVTGTDSTV |
| SEQ ID NO: 1729 | RPIDPTAPSIVTGTDSTVD |
| SEQ ID NO: 1730 | PIDPTAPSIVTGTDSTVDL |
| SEQ ID NO: 1731 | IDPTAPSIVTGTDSTVDLL |
| SEQ ID NO: 1732 | DPTAPSIVTGTDSTVDLLP |
| SEQ ID NO: 1733 | PTAPSIVTGTDSTVDLLPG |
| SEQ ID NO: 1734 | IGPTDLIPLDTVRPIDPTAP |
| SEQ ID NO: 1735 | GPTDLIPLDTVRPIDPTAPS |
| SEQ ID NO: 1736 | PTDLIPLDTVRPIDPTAPSI |
| SEQ ID NO: 1737 | TDLIPLDTVRPIDPTAPSIV |
| SEQ ID NO: 1738 | DLIPLDTVRPIDPTAPSIVT |
| SEQ ID NO: 1739 | LIPLDTVRPIDPTAPSIVTG |
| SEQ ID NO: 1740 | IPLDTVRPIDPTAPSIVTGT |
| SEQ ID NO: 1741 | PLDTVRPIDPTAPSIVTGTD |
| SEQ ID NO: 1742 | LDTVRPIDPTAPSIVTGTDS |
| SEQ ID NO: 1743 | DTVRPIDPTAPSIVTGTDST |
| SEQ ID NO: 1744 | TVRPIDPTAPSIVTGTDSTV |
| SEQ ID NO: 1745 | VRPIDPTAPSIVTGTDSTVD |
| SEQ ID NO: 1746 | RPIDPTAPSIVTGTDSTVDL |
| SEQ ID NO: 1747 | PIDPTAPSIVTGTDSTVDLL |
| SEQ ID NO: 1748 | IDPTAPSIVTGTDSTVDLLP |
| SEQ ID NO: 1749 | DPTAPSIVTGTDSTVDLLPG |
| SEQ ID NO: 1750 | PTAPSIVTGTDSTVDLLPGE |

TABLE 14
P(T/S)AP Motif Containing Peptides from
Human T-Cell Lymphotropic Virus Type Gag Protein
(GenBank Accession No. CAA61543)

| | |
|---|---|
| SEQ ID NO: 1751 | NQVSPSAP |
| SEQ ID NO: 1752 | QVSPSAPA |
| SEQ ID NO: 1753 | VSPSAPAA |
| SEQ ID NO: 1754 | SPSAPAAP |
| SEQ ID NO: 1755 | PSAPAAPV |
| SEQ ID NO: 1756 | KNQVSPSAP |
| SEQ ID NO: 1757 | NQVSPSAPA |
| SEQ ID NO: 1758 | QVSPSAPAA |
| SEQ ID NO: 1759 | VSPSAPAAP |
| SEQ ID NO: 1760 | SPSAPAAPV |
| SEQ ID NO: 1761 | PSAPAAPVP |
| SEQ ID NO: 1762 | VKNQVSPSAP |
| SEQ ID NO: 1763 | KNQVSPSAPA |
| SEQ ID NO: 1764 | NQVSPSAPAA |
| SEQ ID NO: 1765 | QVSPSAPAAP |
| SEQ ID NO: 1766 | VSPSAPAAPV |
| SEQ ID NO: 1767 | SPSAPAAPVP |
| SEQ ID NO: 1768 | PSAPAAPVPT |
| SEQ ID NO: 1769 | LVKNQVSPSAP |
| SEQ ID NO: 1770 | VKNQVSPSAPA |
| SEQ ID NO: 1771 | KNQVSPSAPAA |
| SEQ ID NO: 1772 | NQVSPSAPAAP |
| SEQ ID NO: 1773 | QVSPSAPAAPV |
| SEQ ID NO: 1774 | VSPSAPAAPVP |
| SEQ ID NO: 1775 | SPSAPAAPVPT |
| SEQ ID NO: 1776 | PSAPAAPVPTP |
| SEQ ID NO: 1777 | ILVKNQVSPSAP |
| SEQ ID NO: 1778 | LVKNQVSPSAPA |
| SEQ ID NO: 1779 | VKNQVSPSAPAA |
| SEQ ID NO: 1780 | KNQVSPSAPAAP |
| SEQ ID NO: 1781 | NQVSPSAPAAPV |
| SEQ ID NO: 1782 | QVSPSAPAAPVP |
| SEQ ID NO: 1783 | VSPSAPAAPVPT |
| SEQ ID NO: 1784 | SPSAPAAPVPTP |
| SEQ ID NO: 1785 | PSAPAAPVPTPI |
| SEQ ID NO: 1786 | NILVKNQVSPSAP |
| SEQ ID NO: 1787 | ILVKNQVSPSAPA |
| SEQ ID NO: 1788 | LVKNQVSPSAPAA |
| SEQ ID NO: 1789 | VKNQVSPSAPAAP |
| SEQ ID NO: 1790 | KNQVSPSAPAAPV |
| SEQ ID NO: 1791 | NQVSPSAPAAPVP |
| SEQ ID NO: 1792 | QVSPSAPAAPVPT |
| SEQ ID NO: 1793 | VSPSAPAAPVPTP |
| SEQ ID NO: 1794 | SPSAPAAPVPTPI |
| SEQ ID NO: 1795 | PSAPAAPVPTPIC |
| SEQ ID NO: 1796 | INILVKNQVSPSAP |
| SEQ ID NO: 1797 | NILVKNQVSPSAPA |
| SEQ ID NO: 1798 | ILVKNQVSPSAPAA |
| SEQ ID NO: 1799 | LVKNQVSPSAPAAP |
| SEQ ID NO: 1800 | VKNQVSPSAPAAPV |
| SEQ ID NO: 1801 | KNQVSPSAPAAPVP |
| SEQ ID NO: 1802 | NQVSPSAPAAPVPT |
| SEQ ID NO: 1803 | QVSPSAPAAPVPTP |
| SEQ ID NO: 1804 | VSPSAPAAPVPTPI |
| SEQ ID NO: 1805 | SPSAPAAPVPTPIC |
| SEQ ID NO: 1806 | PSAPAAPVPTPICP |
| SEQ ID NO: 1807 | IINILVKNQVSPSAP |
| SEQ ID NO: 1808 | INILVKNQVSPSAPA |
| SEQ ID NO: 1809 | NILVKNQVSPSAPAA |
| SEQ ID NO: 1810 | ILVKNQVSPSAPAAP |
| SEQ ID NO: 1811 | LVKNQVSPSAPAAPV |
| SEQ ID NO: 1812 | VKNQVSPSAPAAPVP |
| SEQ ID NO: 1813 | KNQVSPSAPAAPVPT |
| SEQ ID NO: 1814 | NQVSPSAPAAPVPTP |
| SEQ ID NO: 1815 | QVSPSAPAAPVPTPI |
| SEQ ID NO: 1816 | VSPSAPAAPVPTPIC |
| SEQ ID NO: 1817 | SPSAPAAPVPTPICP |
| SEQ ID NO: 1818 | PSAPAAPVPTPICPT |
| SEQ ID NO: 1819 | EIINILVKNQVSPSAP |
| SEQ ID NO: 1820 | IINILVKNQVSPSAPA |
| SEQ ID NO: 1821 | INILVKNQVSPSAPAA |
| SEQ ID NO: 1822 | NILVKNQVSPSAPAAP |
| SEQ ID NO: 1823 | ILVKNQVSPSAPAAPV |
| SEQ ID NO: 1824 | LVKNQVSPSAPAAPVP |
| SEQ ID NO: 1825 | VKNQVSPSAPAAPVPT |
| SEQ ID NO: 1826 | KNQVSPSAPAAPVPTP |
| SEQ ID NO: 1827 | NQVSPSAPAAPVPTPI |
| SEQ ID NO: 1828 | QVSPSAPAAPVPTPIC |
| SEQ ID NO: 1829 | VSPSAPAAPVPTPICP |
| SEQ ID NO: 1830 | SPSAPAAPVPTPICPT |
| SEQ ID NO: 1831 | PSAPAAPVPTPICPTT |
| SEQ ID NO: 1832 | VEIINILVKNQVSPSAP |
| SEQ ID NO: 1833 | EIINILVKNQVSPSAPA |
| SEQ ID NO: 1834 | IINILVKNQVSPSAPAA |
| SEQ ID NO: 1835 | INILVKNQVSPSAPAAP |
| SEQ ID NO: 1836 | NILVKNQVSPSAPAAPV |
| SEQ ID NO: 1837 | ILVKNQVSPSAPAAPVP |
| SEQ ID NO: 1838 | LVKNQVSPSAPAAPVPT |
| SEQ ID NO: 1839 | VKNQVSPSAPAAPVPTP |
| SEQ ID NO: 1840 | KNQVSPSAPAAPVPTPI |
| SEQ ID NO: 1841 | NQVSPSAPAAPVPTPIC |
| SEQ ID NO: 1842 | QVSPSAPAAPVPTPICP |
| SEQ ID NO: 1843 | VSPSAPAAPVPTPICPT |
| SEQ ID NO: 1844 | SPSAPAAPVPTPICPTT |
| SEQ ID NO: 1845 | PSAPAAPVPTPICPTTT |
| SEQ ID NO: 1846 | VVEIINILVKNQVSPSAP |
| SEQ ID NO: 1847 | VEIINILVKNQVSPSAPA |
| SEQ ID NO: 1848 | EIINILVKNQVSPSAPAA |
| SEQ ID NO: 1849 | IINILVKNQVSPSAPAAP |
| SEQ ID NO: 1850 | INILVKNQVSPSAPAAPV |
| SEQ ID NO: 1851 | NILVKNQVSPSAPAAPVP |
| SEQ ID NO: 1852 | ILVKNQVSPSAPAAPVPT |
| SEQ ID NO: 1853 | LVKNQVSPSAPAAPVPTP |
| SEQ ID NO: 1854 | VKNQVSPSAPAAPVPTPI |
| SEQ ID NO: 1855 | KNQVSPSAPAAPVPTPIC |
| SEQ ID NO: 1856 | NQVSPSAPAAPVPTPICP |
| SEQ ID NO: 1857 | QVSPSAPAAPVPTPICPT |
| SEQ ID NO: 1858 | VSPSAPAAPVPTPICPTT |
| SEQ ID NO: 1859 | SPSAPAAPVPTPICPTTT |
| SEQ ID NO: 1860 | PSAPAAPVPTPICPTTTP |
| SEQ ID NO: 1861 | RVVEIINILVKNQVSPSAP |
| SEQ ID NO: 1862 | VVEIINILVKNQVSPSAPA |
| SEQ ID NO: 1863 | VEIINILVKNQVSPSAPAA |
| SEQ ID NO: 1864 | EIINILVKNQVSPSAPAAP |
| SEQ ID NO: 1865 | IINILVKNQVSPSAPAAPV |
| SEQ ID NO: 1866 | INILVKNQVSPSAPAAPVP |
| SEQ ID NO: 1867 | NILVKNQVSPSAPAAPVPT |
| SEQ ID NO: 1868 | ILVKNQVSPSAPAAPVPTP |
| SEQ ID NO: 1869 | LVKNQVSPSAPAAPVPTPI |
| SEQ ID NO: 1870 | VKNQVSPSAPAAPVPTPIC |
| SEQ ID NO: 1871 | KNQVSPSAPAAPVPTPICP |
| SEQ ID NO: 1872 | NQVSPSAPAAPVPTPICPT |
| SEQ ID NO: 1873 | QVSPSAPAAPVPTPICPTT |
| SEQ ID NO: 1874 | VSPSAPAAPVPTPICPTTT |
| SEQ ID NO: 1875 | SPSAPAAPVPTPICPTTTP |
| SEQ ID NO: 1876 | PSAPAAPVPTPICPTTTPP |
| SEQ ID NO: 1877 | GRVVEIINILVKNQVSPSAP |
| SEQ ID NO: 1878 | RVVEIINILVKNQVSPSAPA |
| SEQ ID NO: 1879 | VVEIINILVKNQVSPSAPAA |
| SEQ ID NO: 1880 | VEIINILVKNQVSPSAPAAP |
| SEQ ID NO: 1881 | EIINILVKNQVSPSAPAAPV |
| SEQ ID NO: 1882 | IINILVKNQVSPSAPAAPVP |
| SEQ ID NO: 1883 | INILVKNQVSPSAPAAPVPT |
| SEQ ID NO: 1884 | NILVKNQVSPSAPAAPVPTP |
| SEQ ID NO: 1885 | ILVKNQVSPSAPAAPVPTPI |
| SEQ ID NO: 1886 | LVKNQVSPSAPAAPVPTPIC |
| SEQ ID NO: 1887 | VKNQVSPSAPAAPVPTPICP |
| SEQ ID NO: 1888 | KNQVSPSAPAAPVPTPICPT |
| SEQ ID NO: 1889 | NQVSPSAPAAPVPTPICPTT |
| SEQ ID NO: 1890 | QVSPSAPAAPVPTPICPTTT |
| SEQ ID NO: 1891 | VSPSAPAAPVPTPICPTTTP |
| SEQ ID NO: 1892 | SPSAPAAPVPTPICPTTTPP |
| SEQ ID NO: 1893 | PSAPAAPVPTPICPTTTPPP |

TABLE 15
P(T/S)AP Motif Containing Peptides from
West Nile Virus Polyprotein
(GenBank Accession No. NP_041724)

| | |
|---|---|
| SEQ ID NO: 1894 | FSITPSAP |
| SEQ ID NO: 1895 | SITPSAPS |
| SEQ ID NO: 1896 | ITPSAPSY |
| SEQ ID NO: 1897 | TPSAPSYT |
| SEQ ID NO: 1898 | PSAPSYTL |
| SEQ ID NO: 1899 | RFSITPSAP |
| SEQ ID NO: 1900 | FSITPSAPS |
| SEQ ID NO: 1901 | SITPSAPSY |
| SEQ ID NO: 1902 | ITPSAPSYT |
| SEQ ID NO: 1903 | TPSAPSYTL |
| SEQ ID NO: 1904 | PSAPSYTLK |
| SEQ ID NO: 1905 | GRFSITPSAP |
| SEQ ID NO: 1906 | RFSITPSAPS |
| SEQ ID NO: 1907 | FSITPSAPSY |
| SEQ ID NO: 1908 | SITPSAPSYT |
| SEQ ID NO: 1909 | ITPSAPSYTL |
| SEQ ID NO: 1910 | TPSAPSYTLK |
| SEQ ID NO: 1911 | PSAPSYTLKL |
| SEQ ID NO: 1912 | AGRFSITPSAP |
| SEQ ID NO: 1913 | GRFSITPSAPS |
| SEQ ID NO: 1914 | RFSITPSAPSY |
| SEQ ID NO: 1915 | FSITPSAPSYT |
| SEQ ID NO: 1916 | SITPSAPSYTL |
| SEQ ID NO: 1917 | ITPSAPSYTLK |
| SEQ ID NO: 1918 | TPSAPSYTLKL |
| SEQ ID NO: 1919 | PSAPSYTLKLG |
| SEQ ID NO: 1920 | QAGRFSITPSAP |
| SEQ ID NO: 1921 | AGRFSITPSAPS |
| SEQ ID NO: 1922 | GRFSITPSAPSY |
| SEQ ID NO: 1923 | RFSITPSAPSYT |
| SEQ ID NO: 1924 | FSITPSAPSYTL |
| SEQ ID NO: 1925 | SITPSAPSYTLK |
| SEQ ID NO: 1926 | ITPSAPSYTLKL |
| SEQ ID NO: 1927 | TPSAPSYTLKLG |
| SEQ ID NO: 1928 | PSAPSYTLKLGE |
| SEQ ID NO: 1929 | TQAGRFSITPSAP |
| SEQ ID NO: 1930 | QAGRFSITPSAPS |
| SEQ ID NO: 1931 | AGRFSITPSAPSY |
| SEQ ID NO: 1932 | GRFSITPSAPSYT |
| SEQ ID NO: 1933 | RFSITPSAPSYTL |
| SEQ ID NO: 1934 | FSITPSAPSYTLK |
| SEQ ID NO: 1935 | SITPSAPSYTLKL |
| SEQ ID NO: 1936 | ITPSAPSYTLKLG |
| SEQ ID NO: 1937 | TPSAPSYTLKLGE |
| SEQ ID NO: 1938 | PSAPSYTLKLGEY |
| SEQ ID NO: 1939 | ATQAGRFSITPSAP |
| SEQ ID NO: 1940 | TQAGRFSITPSAPS |
| SEQ ID NO: 1941 | QAGRFSITPSAPSY |
| SEQ ID NO: 1942 | AGRFSITPSAPSYT |
| SEQ ID NO: 1943 | GRFSITPSAPSYTL |
| SEQ ID NO: 1944 | RFSITPSAPSYTLK |
| SEQ ID NO: 1945 | FSITPSAPSYTLKL |
| SEQ ID NO: 1946 | SITPSAPSYTLKLG |
| SEQ ID NO: 1947 | ITPSAPSYTLKLGE |
| SEQ ID NO: 1948 | TPSAPSYTLKLGEY |
| SEQ ID NO: 1949 | PSAPSYTLKLGEYG |
| SEQ ID NO: 1950 | GATQAGRFSITPSAP |
| SEQ ID NO: 1951 | ATQAGRFSITPSAPS |
| SEQ ID NO: 1952 | TQAGRFSITPSAPSY |
| SEQ ID NO: 1953 | QAGRFSITPSAPSYT |
| SEQ ID NO: 1954 | AGRFSITPSAPSYTL |
| SEQ ID NO: 1955 | GRFSITPSAPSYTLK |
| SEQ ID NO: 1956 | RFSITPSAPSYTLKL |
| SEQ ID NO: 1957 | FSITPSAPSYTLKLG |
| SEQ ID NO: 1958 | SITPSAPSYTLKLGE |
| SEQ ID NO: 1959 | ITPSAPSYTLKLGEY |
| SEQ ID NO: 1960 | TPSAPSYTLKLGEYG |
| SEQ ID NO: 1961 | PSAPSYTLKLGEYGE |
| SEQ ID NO: 1962 | IGATQAGRFSITPSAP |
| SEQ ID NO: 1963 | GATQAGRFSITPSAPS |
| SEQ ID NO: 1964 | ATQAGRFSITPSAPSY |
| SEQ ID NO: 1965 | TQAGRFSITPSAPSYT |
| SEQ ID NO: 1966 | QAGRFSITPSAPSYTL |
| SEQ ID NO: 1967 | AGRFSITPSAPSYTLK |
| SEQ ID NO: 1968 | GRFSITPSAPSYTLKL |
| SEQ ID NO: 1969 | RFSITPSAPSYTLKLG |
| SEQ ID NO: 1970 | FSITPSAPSYTLKLGE |
| SEQ ID NO: 1971 | SITPSAPSYTLKLGEY |
| SEQ ID NO: 1972 | ITPSAPSYTLKLGEYG |
| SEQ ID NO: 1973 | TPSAPSYTLKLGEYGE |
| SEQ ID NO: 1974 | PSAPSYTLKLGEYGEV |
| SEQ ID NO: 1975 | KIGATQAGRFSITPSAP |
| SEQ ID NO: 1976 | IGATQAGRFSITPSAPS |
| SEQ ID NO: 1977 | GATQAGRFSITPSAPSY |
| SEQ ID NO: 1978 | ATQAGRFSITPSAPSYT |
| SEQ ID NO: 1979 | TQAGRFSITPSAPSYTL |
| SEQ ID NO: 1980 | QAGRFSITPSAPSYTLK |
| SEQ ID NO: 1981 | AGRFSITPSAPSYTLKL |
| SEQ ID NO: 1982 | GRFSITPSAPSYTLKLG |
| SEQ ID NO: 1983 | RFSITPSAPSYTLKLGE |
| SEQ ID NO: 1984 | FSITPSAPSYTLKLGEY |
| SEQ ID NO: 1985 | SITPSAPSYTLKLGEYG |
| SEQ ID NO: 1986 | ITPSAPSYTLKLGEYGE |
| SEQ ID NO: 1987 | TPSAPSYTLKLGEYGEV |
| SEQ ID NO: 1988 | PSAPSYTLKLGEYGEVT |
| SEQ ID NO: 1989 | GKIGATQAGRFSITPSAP |
| SEQ ID NO: 1990 | KIGATQAGRFSITPSAPS |
| SEQ ID NO: 1991 | IGATQAGRFSITPSAPSY |
| SEQ ID NO: 1992 | GATQAGRFSITPSAPSYT |
| SEQ ID NO: 1993 | ATQAGRFSITPSAPSYTL |
| SEQ ID NO: 1994 | TQAGRFSITPSAPSYTLK |
| SEQ ID NO: 1995 | QAGRFSITPSAPSYTLKL |
| SEQ ID NO: 1996 | AGRFSITPSAPSYTLKLG |
| SEQ ID NO: 1997 | GRFSITPSAPSYTLKLGE |
| SEQ ID NO: 1998 | RFSITPSAPSYTLKLGEY |
| SEQ ID NO: 1999 | FSITPSAPSYTLKLGEYG |
| SEQ ID NO: 2000 | SITPSAPSYTLKLGEYGE |
| SEQ ID NO: 2001 | ITPSAPSYTLKLGEYGEV |
| SEQ ID NO: 2002 | TPSAPSYTLKLGEYGEVT |
| SEQ ID NO: 2003 | PSAPSYTLKLGEYGEVTV |
| SEQ ID NO: 2004 | HGKIGATQAGRFSITPSAP |
| SEQ ID NO: 2005 | GKIGATQAGRFSITPSAPS |
| SEQ ID NO: 2006 | KIGATQAGRFSITPSAPSY |
| SEQ ID NO: 2007 | IGATQAGRFSITPSAPSYT |
| SEQ ID NO: 2008 | GATQAGRFSITPSAPSYTL |
| SEQ ID NO: 2009 | ATQAGRFSITPSAPSYTLK |
| SEQ ID NO: 2010 | TQAGRFSITPSAPSYTLKL |
| SEQ ID NO: 2011 | QAGRFSITPSAPSYTLKLG |
| SEQ ID NO: 2012 | AGRFSITPSAPSYTLKLGE |
| SEQ ID NO: 2013 | GRFSITPSAPSYTLKLGEY |
| SEQ ID NO: 2014 | RFSITPSAPSYTLKLGEYG |
| SEQ ID NO: 2015 | FSITPSAPSYTLKLGEYGE |
| SEQ ID NO: 2016 | SITPSAPSYTLKLGEYGEV |
| SEQ ID NO: 2017 | ITPSAPSYTLKLGEYGEVT |
| SEQ ID NO: 2018 | TPSAPSYTLKLGEYGEVTV |
| SEQ ID NO: 2019 | PSAPSYTLKLGEYGEVTVD |
| SEQ ID NO: 2020 | SHGKIGATQAGRFSITPSAP |
| SEQ ID NO: 2021 | HGKIGATQAGRFSITPSAPS |
| SEQ ID NO: 2022 | GKIGATQAGRFSITPSAPSY |
| SEQ ID NO: 2023 | KIGATQAGRFSITPSAPSYT |
| SEQ ID NO: 2024 | IGATQAGRFSITPSAPSYTL |
| SEQ ID NO: 2025 | GATQAGRFSITPSAPSYTLK |
| SEQ ID NO: 2026 | ATQAGRFSITPSAPSYTLKL |
| SEQ ID NO: 2027 | TQAGRFSITPSAPSYTLKLG |
| SEQ ID NO: 2028 | QAGRFSITPSAPSYTLKLGE |
| SEQ ID NO: 2029 | AGRFSITPSAPSYTLKLGEY |
| SEQ ID NO: 2030 | GRFSITPSAPSYTLKLGEYG |
| SEQ ID NO: 2031 | RFSITPSAPSYTLKLGEYGE |
| SEQ ID NO: 2032 | FSITPSAPSYTLKLGEYGEV |
| SEQ ID NO: 2033 | SITPSAPSYTLKLGEYGEVT |
| SEQ ID NO: 2034 | ITPSAPSYTLKLGEYGEVTV |
| SEQ ID NO: 2035 | TPSAPSYTLKLGEYGEVTVD |
| SEQ ID NO: 2036 | PSAPSYTLKLGEYGEVTVDC |

TABLE 16
P(T/S)AP Motif Containing Peptides from Measles
Virus Matrix protein
(GenBank Accession No. CAA34587)

| | |
|---|---|
| SEQ ID NO: 2037 | AAPQPSAP |
| SEQ ID NO: 2038 | APQPSAPQ |
| SEQ ID NO: 2039 | PQPSAPQE |
| SEQ ID NO: 2040 | QPSAPQEP |
| SEQ ID NO: 2041 | PSAPQEPR |
| SEQ ID NO: 2042 | QAAPQPSAP |
| SEQ ID NO: 2043 | AAPQPSAPQ |
| SEQ ID NO: 2044 | APQPSAPQE |
| SEQ ID NO: 2045 | PQPSAPQEP |
| SEQ ID NO: 2046 | QPSAPQEPR |
| SEQ ID NO: 2047 | PSAPQEPRT |
| SEQ ID NO: 2048 | IQAAPQPSAP |
| SEQ ID NO: 2049 | QAAPQPSAPQ |
| SEQ ID NO: 2050 | AAPQPSAPQE |
| SEQ ID NO: 2051 | APQPSAPQEP |
| SEQ ID NO: 2052 | PQPSAPQEPR |
| SEQ ID NO: 2053 | QPSAPQEPRT |
| SEQ ID NO: 2054 | PSAPQEPRTH |
| SEQ ID NO: 2055 | RIQAAPQPSAP |
| SEQ ID NO: 2056 | IQAAPQPSAPQ |
| SEQ ID NO: 2057 | QAAPQPSAPQE |
| SEQ ID NO: 2058 | AAPQPSAPQEP |
| SEQ ID NO: 2059 | APQPSAPQEPR |
| SEQ ID NO: 2060 | PQPSAPQEPRT |
| SEQ ID NO: 2061 | QPSAPQEPRTH |
| SEQ ID NO: 2062 | PSAPQEPRTHD |
| SEQ ID NO: 2063 | ARIQAAPQPSAP |
| SEQ ID NO: 2064 | RIQAAPQPSAPQ |
| SEQ ID NO: 2065 | IQAAPQPSAPQE |
| SEQ ID NO: 2066 | QAAPQPSAPQEP |
| SEQ ID NO: 2067 | AAPQPSAPQEPR |
| SEQ ID NO: 2068 | APQPSAPQEPRT |
| SEQ ID NO: 2069 | PQPSAPQEPRTH |
| SEQ ID NO: 2070 | QPSAPQEPRTHD |
| SEQ ID NO: 2071 | PSAPQEPRTHDD |
| SEQ ID NO: 2072 | TARIQAAPQPSAP |
| SEQ ID NO: 2073 | ARIQAAPQPSAPQ |
| SEQ ID NO: 2074 | RIQAAPQPSAPQE |
| SEQ ID NO: 2075 | IQAAPQPSAPQEP |
| SEQ ID NO: 2076 | QAAPQPSAPQEPR |
| SEQ ID NO: 2077 | AAPQPSAPQEPRT |
| SEQ ID NO: 2078 | APQPSAPQEPRTH |
| SEQ ID NO: 2079 | PQPSAPQEPRTHD |
| SEQ ID NO: 2080 | QPSAPQEPRTHDD |
| SEQ ID NO: 2081 | PSAPQEPRTHDDA |
| SEQ ID NO: 2082 | KTARIQAAPQPSAP |
| SEQ ID NO: 2083 | TARIQAAPQPSAPQ |
| SEQ ID NO: 2084 | ARIQAAPQPSAPQE |
| SEQ ID NO: 2085 | RIQAAPQPSAPQEP |
| SEQ ID NO: 2086 | IQAAPQPSAPQEPR |
| SEQ ID NO: 2087 | QAAPQPSAPQEPRT |
| SEQ ID NO: 2088 | AAPQPSAPQEPRTH |
| SEQ ID NO: 2089 | APQPSAPQEPRTHD |
| SEQ ID NO: 2090 | PQPSAPQEPRTHDD |
| SEQ ID NO: 2091 | QPSAPQEPRTHDDA |
| SEQ ID NO: 2092 | PSAPQEPRTHDDAI |
| SEQ ID NO: 2093 | RKTARIQAAPQPSAP |
| SEQ ID NO: 2094 | KTARIQAAPQPSAPQ |
| SEQ ID NO: 2095 | TARIQAAPQPSAPQE |
| SEQ ID NO: 2096 | ARIQAAPQPSAPQEP |
| SEQ ID NO: 2097 | RIQAAPQPSAPQEPR |
| SEQ ID NO: 2098 | IQAAPQPSAPQEPRT |
| SEQ ID NO: 2099 | QAAPQPSAPQEPRTH |
| SEQ ID NO: 2100 | AAPQPSAPQEPRTHD |
| SEQ ID NO: 2101 | APQPSAPQEPRTHDD |
| SEQ ID NO: 2102 | PQPSAPQEPRTHDDA |
| SEQ ID NO: 2103 | QPSAPQEPRTHDDAI |
| SEQ ID NO: 2104 | PSAPQEPRTHDDAIT |
| SEQ ID NO: 2105 | RRKTARIQAAPQPSAP |
| SEQ ID NO: 2106 | RKTARIQAAPQPSAPQ |
| SEQ ID NO: 2107 | KTARIQAAPQPSAPQE |
| SEQ ID NO: 2108 | TARIQAAPQPSAPQEP |
| SEQ ID NO: 2109 | ARIQAAPQPSAPQEPR |
| SEQ ID NO: 2110 | RIQAAPQPSAPQEPRT |
| SEQ ID NO: 2111 | IQAAPQPSAPQEPRTH |
| SEQ ID NO: 2112 | QAAPQPSAPQEPRTHD |
| SEQ ID NO: 2113 | AAPQPSAPQEPRTHDD |
| SEQ ID NO: 2114 | APQPSAPQEPRTHDDA |
| SEQ ID NO: 2115 | PQPSAPQEPRTHDDAI |
| SEQ ID NO: 2116 | QPSAPQEPRTHDDAIT |
| SEQ ID NO: 2117 | PSAPQEPRTHDDAITN |
| SEQ ID NO: 2118 | SRRKTARIQAAPQPSAP |
| SEQ ID NO: 2119 | RRKTARIQAAPQPSAPQ |
| SEQ ID NO: 2120 | RKTARIQAAPQPSAPQE |
| SEQ ID NO: 2121 | KTARIQAAPQPSAPQEP |
| SEQ ID NO: 2122 | TARIQAAPQPSAPQEPR |
| SEQ ID NO: 2123 | ARIQAAPQPSAPQEPRT |
| SEQ ID NO: 2124 | RIQAAPQPSAPQEPRTH |
| SEQ ID NO: 2125 | IQAAPQPSAPQEPRTHD |
| SEQ ID NO: 2126 | QAAPQPSAPQEPRTHDD |
| SEQ ID NO: 2127 | AAPQPSAPQEPRTHDDA |
| SEQ ID NO: 2128 | APQPSAPQEPRTHDDAI |
| SEQ ID NO: 2129 | PQPSAPQEPRTHDDAIT |
| SEQ ID NO: 2130 | QPSAPQEPRTHDDAITN |
| SEQ ID NO: 2131 | PSAPQEPRTHDDAITND |
| SEQ ID NO: 2132 | RSRRKTARIQAAPQPSAP |
| SEQ ID NO: 2133 | SRRKTARIQAAPQPSAPQ |
| SEQ ID NO: 2134 | RRKTARIQAAPQPSAPQE |
| SEQ ID NO: 2135 | RKTARIQAAPQPSAPQEP |
| SEQ ID NO: 2136 | KTARIQAAPQPSAPQEPR |
| SEQ ID NO: 2137 | TARIQAAPQPSAPQEPRT |
| SEQ ID NO: 2138 | ARIQAAPQPSAPQEPRTH |
| SEQ ID NO: 2139 | RIQAAPQPSAPQEPRTHD |
| SEQ ID NO: 2140 | IQAAPQPSAPQEPRTHDD |
| SEQ ID NO: 2141 | QAAPQPSAPQEPRTHDDA |
| SEQ ID NO: 2142 | AAPQPSAPQEPRTHDDAI |
| SEQ ID NO: 2143 | APQPSAPQEPRTHDDAIT |
| SEQ ID NO: 2144 | PQPSAPQEPRTHDDAITN |
| SEQ ID NO: 2145 | QPSAPQEPRTHDDAITND |
| SEQ ID NO: 2146 | PSAPQEPRTHDDAITNDD |
| SEQ ID NO: 2147 | WRSRRKTARIQAAPQPSAP |
| SEQ ID NO: 2148 | RSRRKTARIQAAPQPSAPQ |
| SEQ ID NO: 2149 | SRRKTARIQAAPQPSAPQE |
| SEQ ID NO: 2150 | RRKTARIQAAPQPSAPQEP |
| SEQ ID NO: 2151 | RKTARIQAAPQPSAPQEPR |
| SEQ ID NO: 2152 | KTARIQAAPQPSAPQEPRT |
| SEQ ID NO: 2153 | TARIQAAPQPSAPQEPRTH |
| SEQ ID NO: 2154 | ARIQAAPQPSAPQEPRTHD |
| SEQ ID NO: 2155 | RIQAAPQPSAPQEPRTHDD |
| SEQ ID NO: 2156 | IQAAPQPSAPQEPRTHDDA |
| SEQ ID NO: 2157 | QAAPQPSAPQEPRTHDDAI |
| SEQ ID NO: 2158 | AAPQPSAPQEPRTHDDAIT |
| SEQ ID NO: 2159 | APQPSAPQEPRTHDDAITN |
| SEQ ID NO: 2160 | PQPSAPQEPRTHDDAITND |
| SEQ ID NO: 2161 | QPSAPQEPRTHDDAITNDD |
| SEQ ID NO: 2162 | PSAPQEPRTHDDAITNDDQ |
| SEQ ID NO: 2163 | LWRSRRKTARIQAAPQPSAP |
| SEQ ID NO: 2164 | WRSRRKTARIQAAPQPSAPQ |
| SEQ ID NO: 2165 | RSRRKTARIQAAPQPSAPQE |
| SEQ ID NO: 2166 | SRRKTARIQAAPQPSAPQEP |
| SEQ ID NO: 2167 | RRKTARIQAAPQPSAPQEPR |
| SEQ ID NO: 2168 | RKTARIQAAPQPSAPQEPRT |
| SEQ ID NO: 2169 | KTARIQAAPQPSAPQEPRTH |
| SEQ ID NO: 2170 | TARIQAAPQPSAPQEPRTHD |
| SEQ ID NO: 2171 | ARIQAAPQPSAPQEPRTHDD |
| SEQ ID NO: 2172 | RIQAAPQPSAPQEPRTHDDA |
| SEQ ID NO: 2173 | IQAAPQPSAPQEPRTHDDAI |
| SEQ ID NO: 2174 | QAAPQPSAPQEPRTHDDAIT |
| SEQ ID NO: 2175 | AAPQPSAPQEPRTHDDAITN |
| SEQ ID NO: 2176 | APQPSAPQEPRTHDDAITND |
| SEQ ID NO: 2177 | PQPSAPQEPRTHDDAITNDD |
| SEQ ID NO: 2178 | QPSAPQEPRTHDDAITNDDQ |
| SEQ ID NO: 2179 | PSAPQEPRTHDDAITNDDQG |

TABLE 17
P(T/S)AP Motif Containing Peptides from Rubella
Virus Non-Structural Protein
(GenBank Accession No. BAB32473)

| | |
|---|---|
| SEQ ID NO: 2180 | PRERPSAP |
| SEQ ID NO: 2181 | RERPSAPA |
| SEQ ID NO: 2182 | ERPSAPAG |
| SEQ ID NO: 2183 | RPSAPAGP |
| SEQ ID NO: 2184 | PSAPAGPP |
| SEQ ID NO: 2185 | APRERPSAP |
| SEQ ID NO: 2186 | PRERPSAPA |
| SEQ ID NO: 2187 | RERPSAPAG |
| SEQ ID NO: 2188 | ERPSAPAGP |
| SEQ ID NO: 2189 | RPSAPAGPP |
| SEQ ID NO: 2190 | PSAPAGPPD |
| SEQ ID NO: 2191 | DAPRERPSAP |
| SEQ ID NO: 2192 | APRERPSAPA |
| SEQ ID NO: 2193 | PRERPSAPAG |
| SEQ ID NO: 2194 | RERPSAPAGP |
| SEQ ID NO: 2195 | ERPSAPAGPP |
| SEQ ID NO: 2196 | RPSAPAGPPD |
| SEQ ID NO: 2197 | PSAPAGPPDD |
| SEQ ID NO: 2198 | CDAPRERPSAP |
| SEQ ID NO: 2199 | DAPRERPSAPA |
| SEQ ID NO: 2200 | APRERPSAPAG |
| SEQ ID NO: 2201 | PRERPSAPAGP |
| SEQ ID NO: 2202 | RERPSAPAGPP |
| SEQ ID NO: 2203 | ERPSAPAGPPD |
| SEQ ID NO: 2204 | RPSAPAGPPDD |
| SEQ ID NO: 2205 | PSAPAGPPDDE |
| SEQ ID NO: 2206 | RCDAPRERPSAP |
| SEQ ID NO: 2207 | CDAPRERPSAPA |
| SEQ ID NO: 2208 | DAPRERPSAPAG |
| SEQ ID NO: 2209 | APRERPSAPAGP |
| SEQ ID NO: 2210 | PRERPSAPAGPP |
| SEQ ID NO: 2211 | RERPSAPAGPPD |
| SEQ ID NO: 2212 | ERPSAPAGPPDD |
| SEQ ID NO: 2213 | RPSAPAGPPDDE |
| SEQ ID NO: 2214 | PSAPAGPPDDEA |
| SEQ ID NO: 2215 | PRCDAPRERPSAP |
| SEQ ID NO: 2216 | RCDAPRERPSAPA |
| SEQ ID NO: 2217 | CDAPRERPSAPAG |
| SEQ ID NO: 2218 | DAPRERPSAPAGP |
| SEQ ID NO: 2219 | APRERPSAPAGPP |
| SEQ ID NO: 2220 | PRERPSAPAGPPD |
| SEQ ID NO: 2221 | RERPSAPAGPPDD |
| SEQ ID NO: 2222 | ERPSAPAGPPDDE |
| SEQ ID NO: 2223 | RPSAPAGPPDDEA |
| SEQ ID NO: 2224 | PSAPAGPPDDEAL |
| SEQ ID NO: 2225 | APRCDAPRERPSAP |
| SEQ ID NO: 2226 | PRCDAPRERPSAPA |
| SEQ ID NO: 2227 | RCDAPRERPSAPAG |
| SEQ ID NO: 2228 | CDAPRERPSAPAGP |
| SEQ ID NO: 2229 | DAPRERPSAPAGPP |
| SEQ ID NO: 2230 | APRERPSAPAGPPD |
| SEQ ID NO: 2231 | PRERPSAPAGPPDD |
| SEQ ID NO: 2232 | RERPSAPAGPPDDE |
| SEQ ID NO: 2233 | ERPSAPAGPPDDEA |
| SEQ ID NO: 2234 | RPSAPAGPPDDEAL |
| SEQ ID NO: 2235 | PSAPAGPPDDEALI |
| SEQ ID NO: 2236 | CAPRCDAPRERPSAP |
| SEQ ID NO: 2237 | APRCDAPRERPSAPA |
| SEQ ID NO: 2238 | PRCDAPRERPSAPAG |
| SEQ ID NO: 2239 | RCDAPRERPSAPAGP |
| SEQ ID NO: 2240 | CDAPRERPSAPAGPP |
| SEQ ID NO: 2241 | DAPRERPSAPAGPPD |
| SEQ ID NO: 2242 | APRERPSAPAGPPDD |
| SEQ ID NO: 2243 | PRERPSAPAGPPDDE |
| SEQ ID NO: 2244 | RERPSAPAGPPDDEA |
| SEQ ID NO: 2245 | ERPSAPAGPPDDEAL |
| SEQ ID NO: 2246 | RPSAPAGPPDDEALI |
| SEQ ID NO: 2247 | PSAPAGPPDDEALIP |
| SEQ ID NO: 2248 | ACAPRCDAPRERPSAP |
| SEQ ID NO: 2249 | CAPRCDAPRERPSAPA |
| SEQ ID NO: 2250 | APRCDAPRERPSAPAG |
| SEQ ID NO: 2251 | PRCDAPRERPSAPAGP |
| SEQ ID NO: 2252 | RCDAPRERPSAPAGPP |
| SEQ ID NO: 2253 | CDAPRERPSAPAGPPD |
| SEQ ID NO: 2254 | DAPRERPSAPAGPPDD |
| SEQ ID NO: 2255 | APRERPSAPAGPPDDE |
| SEQ ID NO: 2256 | PRERPSAPAGPPDDEA |
| SEQ ID NO: 2257 | RERPSAPAGPPDDEAL |
| SEQ ID NO: 2258 | ERPSAPAGPPDDEALI |
| SEQ ID NO: 2259 | RPSAPAGPPDDEALIP |
| SEQ ID NO: 2260 | PSAPAGPPDDEALIPP |
| SEQ ID NO: 2261 | CACAPRCDAPRERPSAP |
| SEQ ID NO: 2262 | ACAPRCDAPRERPSAPA |
| SEQ ID NO: 2263 | CAPRCDAPRERPSAPAG |
| SEQ ID NO: 2264 | APRCDAPRERPSAPAGP |
| SEQ ID NO: 2265 | PRCDAPRERPSAPAGPP |
| SEQ ID NO: 2266 | RCDAPRERPSAPAGPPD |
| SEQ ID NO: 2267 | CDAPRERPSAPAGPPDD |
| SEQ ID NO: 2268 | DAPRERPSAPAGPPDDE |
| SEQ ID NO: 2269 | APRERPSAPAGPPDDEA |
| SEQ ID NO: 2270 | PRERPSAPAGPPDDEAL |
| SEQ ID NO: 2271 | RERPSAPAGPPDDEALI |
| SEQ ID NO: 2272 | ERPSAPAGPPDDEALIP |
| SEQ ID NO: 2273 | RPSAPAGPPDDEALIPP |
| SEQ ID NO: 2274 | PSAPAGPPDDEALIPPW |
| SEQ ID NO: 2275 | HCACAPRCDAPRERPSAP |
| SEQ ID NO: 2276 | CACAPRCDAPRERPSAPA |
| SEQ ID NO: 2277 | ACAPRCDAPRERPSAPAG |
| SEQ ID NO: 2278 | CAPRCDAPRERPSAPAGP |
| SEQ ID NO: 2279 | APRCDAPRERPSAPAGPP |
| SEQ ID NO: 2280 | PRCDAPRERPSAPAGPPD |
| SEQ ID NO: 2281 | RCDAPRERPSAPAGPPDD |
| SEQ ID NO: 2282 | CDAPRERPSAPAGPPDDE |
| SEQ ID NO: 2283 | DAPRERPSAPAGPPDDEA |
| SEQ ID NO: 2284 | APRERPSAPAGPPDDEAL |
| SEQ ID NO: 2285 | PRERPSAPAGPPDDEALI |
| SEQ ID NO: 2286 | RERPSAPAGPPDDEALIP |
| SEQ ID NO: 2287 | ERPSAPAGPPDDEALIPP |
| SEQ ID NO: 2288 | RPSAPAGPPDDEALIPPW |
| SEQ ID NO: 2289 | PSAPAGPPDDEALIPPWL |
| SEQ ID NO: 2290 | RHCACAPRCDAPRERPSAP |
| SEQ ID NO: 2291 | HCACAPRCDAPRERPSAPA |
| SEQ ID NO: 2292 | CACAPRCDAPRERPSAPAG |
| SEQ ID NO: 2293 | ACAPRCDAPRERPSAPAGP |
| SEQ ID NO: 2294 | CAPRCDAPRERPSAPAGPP |
| SEQ ID NO: 2295 | APRCDAPRERPSAPAGPPD |
| SEQ ID NO: 2296 | PRCDAPRERPSAPAGPPDD |
| SEQ ID NO: 2297 | RCDAPRERPSAPAGPPDDE |
| SEQ ID NO: 2298 | CDAPRERPSAPAGPPDDEA |
| SEQ ID NO: 2299 | DAPRERPSAPAGPPDDEAL |
| SEQ ID NO: 2300 | APRERPSAPAGPPDDEALI |
| SEQ ID NO: 2301 | PRERPSAPAGPPDDEALIP |
| SEQ ID NO: 2302 | RERPSAPAGPPDDEALIPP |
| SEQ ID NO: 2303 | ERPSAPAGPPDDEALIPPW |
| SEQ ID NO: 2304 | RPSAPAGPPDDEALIPPWL |
| SEQ ID NO: 2305 | PSAPAGPPDDEALIPPWLF |
| SEQ ID NO: 2306 | DRHCACAPRCDAPRERPSAP |
| SEQ ID NO: 2307 | RHCACAPRCDAPRERPSAPA |
| SEQ ID NO: 2308 | HCACAPRCDAPRERPSAPAG |
| SEQ ID NO: 2309 | CACAPRCDAPRERPSAPAGP |
| SEQ ID NO: 2310 | ACAPRCDAPRERPSAPAGPP |
| SEQ ID NO: 2311 | CAPRCDAPRERPSAPAGPPD |
| SEQ ID NO: 2312 | APRCDAPRERPSAPAGPPDD |
| SEQ ID NO: 2313 | PRCDAPRERPSAPAGPPDDE |
| SEQ ID NO: 2314 | RCDAPRERPSAPAGPPDDEA |
| SEQ ID NO: 2315 | CDAPRERPSAPAGPPDDEAL |
| SEQ ID NO: 2316 | DAPRERPSAPAGPPDDEALI |
| SEQ ID NO: 2317 | APRERPSAPAGPPDDEALIP |
| SEQ ID NO: 2318 | PRERPSAPAGPPDDEALIPP |
| SEQ ID NO: 2319 | RERPSAPAGPPDDEALIPPW |
| SEQ ID NO: 2320 | ERPSAPAGPPDDEALIPPWL |
| SEQ ID NO: 2321 | RPSAPAGPPDDEALIPPWLF |
| SEQ ID NO: 2322 | PSAPAGPPDDEALIPPWLFA |

TABLE 18
P(T/S)AP Motif Containing Peptides from
Colorado Tick Fever Virus VP12
(GenBank Accession No. AAB02025)

| | |
|---|---|
| SEQ ID NO: 2323 | TRVAPSAP |
| SEQ ID NO: 2324 | RVAPSAPS |
| SEQ ID NO: 2325 | VAPSAPSA |
| SEQ ID NO: 2326 | APSAPSAS |
| SEQ ID NO: 2327 | PSAPSASL |
| SEQ ID NO: 2328 | STRVAPSAP |
| SEQ ID NO: 2329 | TRVAPSAPS |
| SEQ ID NO: 2330 | RVAPSAPSA |
| SEQ ID NO: 2331 | VAPSAPSAS |
| SEQ ID NO: 2332 | APSAPSASL |
| SEQ ID NO: 2333 | PSAPSASLF |
| SEQ ID NO: 2334 | LSTRVAPSAP |
| SEQ ID NO: 2335 | STRVAPSAPS |
| SEQ ID NO: 2336 | TRVAPSAPSA |
| SEQ ID NO: 2337 | RVAPSAPSAS |
| SEQ ID NO: 2338 | VAPSAPSASL |
| SEQ ID NO: 2339 | APSAPSASLF |
| SEQ ID NO: 2340 | PSAPSASLFT |
| SEQ ID NO: 2341 | PLSTRVAPSAP |
| SEQ ID NO: 2342 | LSTRVAPSAPS |
| SEQ ID NO: 2343 | STRVAPSAPSA |
| SEQ ID NO: 2344 | TRVAPSAPSAS |
| SEQ ID NO: 2345 | RVAPSAPSASL |
| SEQ ID NO: 2346 | VAPSAPSASLF |
| SEQ ID NO: 2347 | APSAPSASLFT |
| SEQ ID NO: 2348 | PSAPSASLFTA |
| SEQ ID NO: 2349 | TPLSTRVAPSAP |
| SEQ ID NO: 2350 | PLSTRVAPSAPS |
| SEQ ID NO: 2351 | LSTRVAPSAPSA |
| SEQ ID NO: 2352 | STRVAPSAPSAS |
| SEQ ID NO: 2353 | TRVAPSAPSASL |
| SEQ ID NO: 2354 | RVAPSAPSASLF |
| SEQ ID NO: 2355 | VAPSAPSASLFT |
| SEQ ID NO: 2356 | APSAPSASLFTA |
| SEQ ID NO: 2357 | PSAPSASLFTAG |
| SEQ ID NO: 2358 | ETPLSTRVAPSAP |
| SEQ ID NO: 2359 | TPLSTRVAPSAPS |
| SEQ ID NO: 2360 | PLSTRVAPSAPSA |
| SEQ ID NO: 2361 | LSTRVAPSAPSAS |
| SEQ ID NO: 2362 | STRVAPSAPSASL |
| SEQ ID NO: 2363 | TRVAPSAPSASLF |
| SEQ ID NO: 2364 | RVAPSAPSASLFT |
| SEQ ID NO: 2365 | VAPSAPSASLFTA |
| SEQ ID NO: 2366 | APSAPSASLFTAG |
| SEQ ID NO: 2367 | PSAPSASLFTAGG |
| SEQ ID NO: 2368 | CETPLSTRVAPSAP |
| SEQ ID NO: 2369 | ETPLSTRVAPSAPS |
| SEQ ID NO: 2370 | TPLSTRVAPSAPSA |
| SEQ ID NO: 2371 | PLSTRVAPSAPSAS |
| SEQ ID NO: 2372 | LSTRVAPSAPSASL |
| SEQ ID NO: 2373 | STRVAPSAPSASLF |
| SEQ ID NO: 2374 | TRVAPSAPSASLFT |
| SEQ ID NO: 2375 | RVAPSAPSASLFTA |
| SEQ ID NO: 2376 | VAPSAPSASLFTAG |
| SEQ ID NO: 2377 | APSAPSASLFTAGG |
| SEQ ID NO: 2378 | PSAPSASLFTAGGI |
| SEQ ID NO: 2379 | ICETPLSTRVAPSAP |
| SEQ ID NO: 2380 | CETPLSTRVAPSAPS |
| SEQ ID NO: 2381 | ETPLSTRVAPSAPSA |
| SEQ ID NO: 2382 | TPLSTRVAPSAPSAS |
| SEQ ID NO: 2383 | PLSTRVAPSAPSASL |
| SEQ ID NO: 2384 | LSTRVAPSAPSASLF |
| SEQ ID NO: 2385 | STRVAPSAPSASLFT |
| SEQ ID NO: 2386 | TRVAPSAPSASLFTA |
| SEQ ID NO: 2387 | RVAPSAPSASLFTAG |
| SEQ ID NO: 2388 | VAPSAPSASLFTAGG |
| SEQ ID NO: 2389 | APSAPSASLFTAGGI |
| SEQ ID NO: 2390 | PSAPSASLFTAGGIG |
| SEQ ID NO: 2391 | HICETPLSTRVAPSAP |
| SEQ ID NO: 2392 | ICETPLSTRVAPSAPS |
| SEQ ID NO: 2393 | CETPLSTRVAPSAPSA |
| SEQ ID NO: 2394 | ETPLSTRVAPSAPSAS |
| SEQ ID NO: 2395 | TPLSTRVAPSAPSASL |
| SEQ ID NO: 2396 | PLSTRVAPSAPSASLF |
| SEQ ID NO: 2397 | LSTRVAPSAPSASLFT |
| SEQ ID NO: 2398 | STRVAPSAPSASLFTA |
| SEQ ID NO: 2399 | TRVAPSAPSASLFTAG |
| SEQ ID NO: 2400 | RVAPSAPSASLFTAGG |
| SEQ ID NO: 2401 | VAPSAPSASLFTAGGI |
| SEQ ID NO: 2402 | APSAPSASLFTAGGIG |
| SEQ ID NO: 2403 | PSAPSASLFTAGGIGL |
| SEQ ID NO: 2404 | PHICETPLSTRVAPSAP |
| SEQ ID NO: 2405 | HICETPLSTRVAPSAPS |
| SEQ ID NO: 2406 | ICETPLSTRVAPSAPSA |
| SEQ ID NO: 2407 | CETPLSTRVAPSAPSAS |
| SEQ ID NO: 2408 | ETPLSTRVAPSAPSASL |
| SEQ ID NO: 2409 | TPLSTRVAPSAPSASLF |
| SEQ ID NO: 2410 | PLSTRVAPSAPSASLFT |
| SEQ ID NO: 2411 | LSTRVAPSAPSASLFTA |
| SEQ ID NO: 2412 | STRVAPSAPSASLFTAG |
| SEQ ID NO: 2413 | TRVAPSAPSASLFTAGG |
| SEQ ID NO: 2414 | RVAPSAPSASLFTAGGI |
| SEQ ID NO: 2415 | VAPSAPSASLFTAGGIG |
| SEQ ID NO: 2416 | APSAPSASLFTAGGIGL |
| SEQ ID NO: 2417 | PSAPSASLFTAGGIGLP |
| SEQ ID NO: 2418 | SPHICETPLSTRVAPSAP |
| SEQ ID NO: 2419 | PHICETPLSTRVAPSAPS |
| SEQ ID NO: 2420 | HICETPLSTRVAPSAPSA |
| SEQ ID NO: 2421 | ICETPLSTRVAPSAPSAS |
| SEQ ID NO: 2422 | CETPLSTRVAPSAPSASL |
| SEQ ID NO: 2423 | ETPLSTRVAPSAPSASLF |
| SEQ ID NO: 2424 | TPLSTRVAPSAPSASLFT |
| SEQ ID NO: 2425 | PLSTRVAPSAPSASLFTA |
| SEQ ID NO: 2426 | LSTRVAPSAPSASLFTAG |
| SEQ ID NO: 2427 | STRVAPSAPSASLFTAGG |
| SEQ ID NO: 2428 | TRVAPSAPSASLFTAGGI |
| SEQ ID NO: 2429 | RVAPSAPSASLFTAGGIG |
| SEQ ID NO: 2430 | VAPSAPSASLFTAGGIGL |
| SEQ ID NO: 2431 | APSAPSASLFTAGGIGLP |
| SEQ ID NO: 2432 | ASPHICETPLSTRVAPSAP |
| SEQ ID NO: 2433 | SPHICETPLSTRVAPSAPS |
| SEQ ID NO: 2434 | PHICETPLSTRVAPSAPSA |
| SEQ ID NO: 2435 | HICETPLSTRVAPSAPSAS |
| SEQ ID NO: 2436 | ICETPLSTRVAPSAPSASL |
| SEQ ID NO: 2437 | CETPLSTRVAPSAPSASLF |
| SEQ ID NO: 2438 | ETPLSTRVAPSAPSASLFT |
| SEQ ID NO: 2439 | TPLSTRVAPSAPSASLFTA |
| SEQ ID NO: 2440 | PLSTRVAPSAPSASLFTAG |
| SEQ ID NO: 2441 | LSTRVAPSAPSASLFTAGG |
| SEQ ID NO: 2442 | STRVAPSAPSASLFTAGGI |
| SEQ ID NO: 2443 | TRVAPSAPSASLFTAGGIG |
| SEQ ID NO: 2444 | RVAPSAPSASLFTAGGIGL |
| SEQ ID NO: 2445 | VAPSAPSASLFTAGGIGLP |
| SEQ ID NO: 2446 | PASPHICETPLSTRVAPSAP |
| SEQ ID NO: 2447 | ASPHICETPLSTRVAPSAPS |
| SEQ ID NO: 2448 | SPHICETPLSTRVAPSAPSA |
| SEQ ID NO: 2449 | PHICETPLSTRVAPSAPSAS |
| SEQ ID NO: 2450 | HICETPLSTRVAPSAPSASL |
| SEQ ID NO: 2451 | ICETPLSTRVAPSAPSASLF |
| SEQ ID NO: 2452 | CETPLSTRVAPSAPSASLFT |
| SEQ ID NO: 2453 | ETPLSTRVAPSAPSASLFTA |
| SEQ ID NO: 2454 | TPLSTRVAPSAPSASLFTAG |
| SEQ ID NO: 2455 | PLSTRVAPSAPSASLFTAGG |
| SEQ ID NO: 2456 | LSTRVAPSAPSASLFTAGGI |
| SEQ ID NO: 2457 | STRVAPSAPSASLFTAGGIG |
| SEQ ID NO: 2458 | TRVAPSAPSASLFTAGGIGL |
| SEQ ID NO: 2459 | RVAPSAPSASLFTAGGIGLP |

TABLE 19
P(T/S)AP Motif Containing Peptides from Foot
and Mouth Disease Virus VP1 Capsid Protein
(GenBank Accession No. AAA42637)

| | |
|---|---|
| SEQ ID NO: 2460 | RLALPTAP |
| SEQ ID NO: 2461 | LALPTAPR |
| SEQ ID NO: 2462 | ALPTAPRV |
| SEQ ID NO: 2463 | LPTAPRVL |
| SEQ ID NO: 2464 | PTAPRVLA |
| SEQ ID NO: 2465 | TRLALPTAP |
| SEQ ID NO: 2466 | RLALPTAPR |
| SEQ ID NO: 2467 | LALPTAPRV |
| SEQ ID NO: 2468 | ALPTAPRVL |
| SEQ ID NO: 2469 | LPTAPRVLA |
| SEQ ID NO: 2470 | PTAPRVLAT |
| SEQ ID NO: 2471 | LTRLALPTAP |
| SEQ ID NO: 2472 | TRLALPTAPR |
| SEQ ID NO: 2473 | RLALPTAPRV |
| SEQ ID NO: 2474 | LALPTAPRVL |
| SEQ ID NO: 2475 | ALPTAPRVLA |
| SEQ ID NO: 2476 | LPTAPRVLAT |
| SEQ ID NO: 2477 | PTAPRVLATV |
| SEQ ID NO: 2478 | ALTRLALPTAP |
| SEQ ID NO: 2479 | LTRLALPTAPR |
| SEQ ID NO: 2480 | TRLALPTAPRV |
| SEQ ID NO: 2481 | RLALPTAPRVL |
| SEQ ID NO: 2482 | LALPTAPRVLA |
| SEQ ID NO: 2483 | ALPTAPRVLAT |
| SEQ ID NO: 2484 | LPTAPRVLATV |
| SEQ ID NO: 2485 | PTAPRVLATVG |
| SEQ ID NO: 2486 | KALTRLALPTAP |
| SEQ ID NO: 2487 | ALTRLALPTAPR |
| SEQ ID NO: 2488 | LTRLALPTAPRV |
| SEQ ID NO: 2489 | TRLALPTAPRVL |
| SEQ ID NO: 2490 | RLALPTAPRVLA |
| SEQ ID NO: 2491 | LALPTAPRVLAT |
| SEQ ID NO: 2492 | ALPTAPRVLATV |
| SEQ ID NO: 2493 | LPTAPRVLATVG |
| SEQ ID NO: 2494 | PTAPRVLATVGE |
| SEQ ID NO: 2495 | AKALTRLALPTAP |
| SEQ ID NO: 2496 | KALTRLALPTAPR |
| SEQ ID NO: 2497 | ALTRLALPTAPRV |
| SEQ ID NO: 2498 | LTRLALPTAPRVL |
| SEQ ID NO: 2499 | TRLALPTAPRVLA |
| SEQ ID NO: 2500 | RLALPTAPRVLAT |
| SEQ ID NO: 2501 | LALPTAPRVLATV |
| SEQ ID NO: 2502 | ALPTAPRVLATVG |
| SEQ ID NO: 2503 | LPTAPRVLATVGE |
| SEQ ID NO: 2504 | PTAPRVLATVGEC |
| SEQ ID NO: 2505 | TAKALTRLALPTAP |
| SEQ ID NO: 2506 | AKALTRLALPTAPR |
| SEQ ID NO: 2507 | KALTRLALPTAPRV |
| SEQ ID NO: 2508 | ALTRLALPTAPRVL |
| SEQ ID NO: 2509 | LTRLALPTAPRVLA |
| SEQ ID NO: 2510 | TRLALPTAPRVLAT |
| SEQ ID NO: 2511 | RLALPTAPRVLATV |
| SEQ ID NO: 2512 | LALPTAPRVLATVG |
| SEQ ID NO: 2513 | ALPTAPRVLATVGE |
| SEQ ID NO: 2514 | LPTAPRVLATVGEC |
| SEQ ID NO: 2515 | PTAPRVLATVGECR |
| SEQ ID NO: 2516 | DTAKALTRLALPTAP |
| SEQ ID NO: 2517 | TAKALTRLALPTAPR |
| SEQ ID NO: 2518 | AKALTRLALPTAPRV |
| SEQ ID NO: 2519 | KALTRLALPTAPRVL |
| SEQ ID NO: 2520 | ALTRLALPTAPRVLA |
| SEQ ID NO: 2521 | LTRLALPTAPRVLAT |
| SEQ ID NO: 2522 | TRLALPTAPRVLATV |
| SEQ ID NO: 2523 | RLALPTAPRVLATVG |
| SEQ ID NO: 2524 | LALPTAPRVLATVGE |
| SEQ ID NO: 2525 | ALPTAPRVLATVGEC |
| SEQ ID NO: 2526 | LPTAPRVLATVGECR |
| SEQ ID NO: 2527 | PTAPRVLATVGECRY |
| SEQ ID NO: 2528 | LDTAKALTRLALPTAP |
| SEQ ID NO: 2529 | DTAKALTRLALPTAPR |
| SEQ ID NO: 2530 | TAKALTRLALPTAPRV |
| SEQ ID NO: 2531 | AKALTRLALPTAPRVL |
| SEQ ID NO: 2532 | KALTRLALPTAPRVLA |
| SEQ ID NO: 2533 | ALTRLALPTAPRVLAT |
| SEQ ID NO: 2534 | LTRLALPTAPRVLATV |
| SEQ ID NO: 2535 | TRLALPTAPRVLATVG |
| SEQ ID NO: 2536 | RLALPTAPRVLATVGE |
| SEQ ID NO: 2537 | LALPTAPRVLATVGEC |
| SEQ ID NO: 2538 | ALPTAPRVLATVGECR |
| SEQ ID NO: 2539 | LPTAPRVLATVGECRY |
| SEQ ID NO: 2540 | PTAPRVLATVGECRYS |
| SEQ ID NO: 2541 | ALDTAKALTRLALPTAP |
| SEQ ID NO: 2542 | LDTAKALTRLALPTAPR |
| SEQ ID NO: 2543 | DTAKALTRLALPTAPRV |
| SEQ ID NO: 2544 | TAKALTRLALPTAPRVL |
| SEQ ID NO: 2545 | AKALTRLALPTAPRVLA |
| SEQ ID NO: 2546 | KALTRLALPTAPRVLAT |
| SEQ ID NO: 2547 | ALTRLALPTAPRVLATV |
| SEQ ID NO: 2548 | LTRLALPTAPRVLATVG |
| SEQ ID NO: 2549 | TRLALPTAPRVLATVGE |
| SEQ ID NO: 2550 | RLALPTAPRVLATVGEC |
| SEQ ID NO: 2551 | LALPTAPRVLATVGECR |
| SEQ ID NO: 2552 | ALPTAPRVLATVGECRY |
| SEQ ID NO: 2553 | LPTAPRVLATVGECRYS |
| SEQ ID NO: 2554 | PTAPRVLATVGECRYSR |
| SEQ ID NO: 2555 | KALDTAKALTRLALPTAP |
| SEQ ID NO: 2556 | ALDTAKALTRLALPTAPR |
| SEQ ID NO: 2557 | LDTAKALTRLALPTAPRV |
| SEQ ID NO: 2558 | DTAKALTRLALPTAPRVL |
| SEQ ID NO: 2559 | TAKALTRLALPTAPRVLA |
| SEQ ID NO: 2560 | AKALTRLALPTAPRVLAT |
| SEQ ID NO: 2561 | KALTRLALPTAPRVLATV |
| SEQ ID NO: 2562 | ALTRLALPTAPRVLATVG |
| SEQ ID NO: 2563 | LTRLALPTAPRVLATVGE |
| SEQ ID NO: 2564 | TRLALPTAPRVLATVGEC |
| SEQ ID NO: 2565 | RLALPTAPRVLATVGECR |
| SEQ ID NO: 2566 | LALPTAPRVLATVGECRY |
| SEQ ID NO: 2567 | ALPTAPRVLATVGECRYS |
| SEQ ID NO: 2568 | LPTAPRVLATVGECRYSR |
| SEQ ID NO: 2569 | PTAPRVLATVGECRYSRN |
| SEQ ID NO: 2570 | EKALDTAKALTRLALPTAP |
| SEQ ID NO: 2571 | KALDTAKALTRLALPTAPR |
| SEQ ID NO: 2572 | ALDTAKALTRLALPTAPRV |
| SEQ ID NO: 2573 | LDTAKALTRLALPTAPRVL |
| SEQ ID NO: 2574 | DTAKALTRLALPTAPRVLA |
| SEQ ID NO: 2575 | TAKALTRLALPTAPRVLAT |
| SEQ ID NO: 2576 | AKALTRLALPTAPRVLATV |
| SEQ ID NO: 2577 | KALTRLALPTAPRVLATVG |
| SEQ ID NO: 2578 | ALTRLALPTAPRVLATVGE |
| SEQ ID NO: 2579 | LTRLALPTAPRVLATVGEC |
| SEQ ID NO: 2580 | TRLALPTAPRVLATVGECR |
| SEQ ID NO: 2581 | RLALPTAPRVLATVGECRY |
| SEQ ID NO: 2582 | LALPTAPRVLATVGECRYS |
| SEQ ID NO: 2583 | ALPTAPRVLATVGECRYSR |
| SEQ ID NO: 2584 | LPTAPRVLATVGECRYSRN |
| SEQ ID NO: 2585 | PTAPRVLATVGECRYSRNA |
| SEQ ID NO: 2586 | PEKALDTAKALTRLALPTAP |
| SEQ ID NO: 2587 | EKALDTAKALTRLALPTAPR |
| SEQ ID NO: 2588 | KALDTAKALTRLALPTAPRV |
| SEQ ID NO: 2589 | ALDTAKALTRLALPTAPRVL |
| SEQ ID NO: 2590 | LDTAKALTRLALPTAPRVLA |
| SEQ ID NO: 2591 | DTAKALTRLALPTAPRVLAT |
| SEQ ID NO: 2592 | TAKALTRLALPTAPRVLATV |
| SEQ ID NO: 2593 | AKALTRLALPTAPRVLATVG |
| SEQ ID NO: 2594 | KALTRLALPTAPRVLATVGE |
| SEQ ID NO: 2595 | ALTRLALPTAPRVLATVGEC |
| SEQ ID NO: 2596 | LTRLALPTAPRVLATVGECR |
| SEQ ID NO: 2597 | TRLALPTAPRVLATVGECRY |
| SEQ ID NO: 2598 | RLALPTAPRVLATVGECRYS |
| SEQ ID NO: 2599 | LALPTAPRVLATVGECRYSR |
| SEQ ID NO: 2600 | ALPTAPRVLATVGECRYSRN |
| SEQ ID NO: 2601 | LPTAPRVLATVGECRYSRNA |
| SEQ ID NO: 2602 | PTAPRVLATVGECRYSRNAP |

TABLE 20
P(T/S)AP Motif Containing Peptides from
Human Foamy Virus Gag Protein
(GenBank Accession No. NP_044279)

| | |
|---|---|
| SEQ ID NO: 2603 | PAPVPSAP |
| SEQ ID NO: 2604 | APVPSAPP |
| SEQ ID NO: 2605 | PVPSAPPM |
| SEQ ID NO: 2606 | VPSAPPMI |
| SEQ ID NO: 2607 | PSAPPMIQ |
| SEQ ID NO: 2608 | LPAPVPSAP |
| SEQ ID NO: 2609 | PAPVPSAPP |
| SEQ ID NO: 2610 | APVPSAPPM |
| SEQ ID NO: 2611 | PVPSAPPMI |
| SEQ ID NO: 2612 | VPSAPPMIQ |
| SEQ ID NO: 2613 | PSAPPMIQY |
| SEQ ID NO: 2614 | ILPAPVPSAP |
| SEQ ID NO: 2615 | LPAPVPSAPP |
| SEQ ID NO: 2616 | PAPVPSAPPM |
| SEQ ID NO: 2617 | APVPSAPPMI |
| SEQ ID NO: 2618 | PVPSAPPMIQ |
| SEQ ID NO: 2619 | VPSAPPMIQY |
| SEQ ID NO: 2620 | PSAPPMIQYI |
| SEQ ID NO: 2621 | EILPAPVPSAP |
| SEQ ID NO: 2622 | ILPAPVPSAPP |
| SEQ ID NO: 2623 | LPAPVPSAPPM |
| SEQ ID NO: 2624 | PAPVPSAPPMI |
| SEQ ID NO: 2625 | APVPSAPPMIQ |
| SEQ ID NO: 2626 | PVPSAPPMIQY |
| SEQ ID NO: 2627 | VPSAPPMIQYI |
| SEQ ID NO: 2628 | PSAPPMIQYIP |
| SEQ ID NO: 2629 | REILPAPVPSAP |
| SEQ ID NO: 2630 | EILPAPVPSAPP |
| SEQ ID NO: 2631 | ILPAPVPSAPPM |
| SEQ ID NO: 2632 | LPAPVPSAPPMI |
| SEQ ID NO: 2633 | PAPVPSAPPMIQ |
| SEQ ID NO: 2634 | APVPSAPPMIQY |
| SEQ ID NO: 2635 | PVPSAPPMIQYI |
| SEQ ID NO: 2636 | VPSAPPMIQYIP |
| SEQ ID NO: 2637 | PSAPPMIQYIPV |
| SEQ ID NO: 2638 | RREILPAPVPSAP |
| SEQ ID NO: 2639 | REILPAPVPSAPP |
| SEQ ID NO: 2640 | EILPAPVPSAPPM |
| SEQ ID NO: 2641 | ILPAPVPSAPPMI |
| SEQ ID NO: 2642 | LPAPVPSAPPMIQ |
| SEQ ID NO: 2643 | PAPVPSAPPMIQY |
| SEQ ID NO: 2644 | APVPSAPPMIQYI |
| SEQ ID NO: 2645 | PVPSAPPMIQYIP |
| SEQ ID NO: 2646 | VPSAPPMIQYIPV |
| SEQ ID NO: 2647 | PSAPPMIQYIPVP |
| SEQ ID NO: 2648 | RRREILPAPVPSAP |
| SEQ ID NO: 2649 | RREILPAPVPSAPP |
| SEQ ID NO: 2650 | REILPAPVPSAPPM |
| SEQ ID NO: 2651 | EILPAPVPSAPPMI |
| SEQ ID NO: 2652 | ILPAPVPSAPPMIQ |
| SEQ ID NO: 2653 | LPAPVPSAPPMIQY |
| SEQ ID NO: 2654 | PAPVPSAPPMIQYI |
| SEQ ID NO: 2655 | APVPSAPPMIQYIP |
| SEQ ID NO: 2656 | PVPSAPPMIQYIPV |
| SEQ ID NO: 2657 | VPSAPPMIQYIPVP |
| SEQ ID NO: 2658 | PSAPPMIQYIPVPP |
| SEQ ID NO: 2659 | ERRREILPAPVPSAP |
| SEQ ID NO: 2660 | RRREILPAPVPSAPP |
| SEQ ID NO: 2661 | RREILPAPVPSAPPM |
| SEQ ID NO: 2662 | REILPAPVPSAPPMI |
| SEQ ID NO: 2663 | EILPAPVPSAPPMIQ |
| SEQ ID NO: 2664 | ILPAPVPSAPPMIQY |
| SEQ ID NO: 2665 | LPAPVPSAPPMIQYI |
| SEQ ID NO: 2666 | PAPVPSAPPMIQYIP |
| SEQ ID NO: 2667 | APVPSAPPMIQYIPV |
| SEQ ID NO: 2668 | PVPSAPPMIQYIPVP |
| SEQ ID NO: 2669 | VPSAPPMIQYIPVPP |
| SEQ ID NO: 2670 | PSAPPMIQYIPVPPP |
| SEQ ID NO: 2671 | RERRREILPAPVPSAP |
| SEQ ID NO: 2672 | ERRREILPAPVPSAPP |
| SEQ ID NO: 2673 | RRREILPAPVPSAPPM |
| SEQ ID NO: 2674 | RREILPAPVPSAPPMI |
| SEQ ID NO: 2675 | REILPAPVPSAPPMIQ |
| SEQ ID NO: 2676 | EILPAPVPSAPPMIQY |
| SEQ ID NO: 2677 | ILPAPVPSAPPMIQYI |
| SEQ ID NO: 2678 | LPAPVPSAPPMIQYIP |
| SEQ ID NO: 2679 | PAPVPSAPPMIQYIPV |
| SEQ ID NO: 2680 | APVPSAPPMIQYIPVP |
| SEQ ID NO: 2681 | PVPSAPPMIQYIPVPP |
| SEQ ID NO: 2682 | VPSAPPMIQYIPVPPP |
| SEQ ID NO: 2683 | PSAPPMIQYIPVPPPP |
| SEQ ID NO: 2684 | SRERRREILPAPVPSAP |
| SEQ ID NO: 2685 | RERRREILPAPVPSAPP |
| SEQ ID NO: 2686 | ERRREILPAPVPSAPPM |
| SEQ ID NO: 2687 | RRREILPAPVPSAPPMI |
| SEQ ID NO: 2688 | RREILPAPVPSAPPMIQ |
| SEQ ID NO: 2689 | REILPAPVPSAPPMIQY |
| SEQ ID NO: 2690 | EILPAPVPSAPPMIQYI |
| SEQ ID NO: 2691 | ILPAPVPSAPPMIQYIP |
| SEQ ID NO: 2692 | LPAPVPSAPPMIQYIPV |
| SEQ ID NO: 2693 | PAPVPSAPPMIQYIPVP |
| SEQ ID NO: 2694 | APVPSAPPMIQYIPVPP |
| SEQ ID NO: 2695 | PVPSAPPMIQYIPVPPP |
| SEQ ID NO: 2696 | VPSAPPMIQYIPVPPPP |
| SEQ ID NO: 2697 | PSAPPMIQYIPVPPPPP |
| SEQ ID NO: 2698 | QSRERRREILPAPVPSAP |
| SEQ ID NO: 2699 | SRERRREILPAPVPSAPP |
| SEQ ID NO: 2700 | RERRREILPAPVPSAPPM |
| SEQ ID NO: 2701 | ERRREILPAPVPSAPPMI |
| SEQ ID NO: 2702 | RRREILPAPVPSAPPMIQ |
| SEQ ID NO: 2703 | RREILPAPVPSAPPMIQY |
| SEQ ID NO: 2704 | REILPAPVPSAPPMIQYI |
| SEQ ID NO: 2705 | EILPAPVPSAPPMIQYIP |
| SEQ ID NO: 2706 | ILPAPVPSAPPMIQYIPV |
| SEQ ID NO: 2707 | LPAPVPSAPPMIQYIPVP |
| SEQ ID NO: 2708 | PAPVPSAPPMIQYIPVPP |
| SEQ ID NO: 2709 | APVPSAPPMIQYIPVPPP |
| SEQ ID NO: 2710 | PVPSAPPMIQYIPVPPPP |
| SEQ ID NO: 2711 | VPSAPPMIQYIPVPPPPP |
| SEQ ID NO: 2712 | PSAPPMIQYIPVPPPPPI |
| SEQ ID NO: 2713 | SQSRERRREILPAPVPSAP |
| SEQ ID NO: 2714 | QSRERRREILPAPVPSAPP |
| SEQ ID NO: 2715 | SRERRREILPAPVPSAPPM |
| SEQ ID NO: 2716 | RERRREILPAPVPSAPPMI |
| SEQ ID NO: 2717 | ERRREILPAPVPSAPPMIQ |
| SEQ ID NO: 2718 | RRREILPAPVPSAPPMIQY |
| SEQ ID NO: 2719 | RREILPAPVPSAPPMIQYI |
| SEQ ID NO: 2720 | REILPAPVPSAPPMIQYIP |
| SEQ ID NO: 2721 | EILPAPVPSAPPMIQYIPV |
| SEQ ID NO: 2722 | ILPAPVPSAPPMIQYIPVP |
| SEQ ID NO: 2723 | LPAPVPSAPPMIQYIPVPP |
| SEQ ID NO: 2724 | PAPVPSAPPMIQYIPVPPP |
| SEQ ID NO: 2725 | APVPSAPPMIQYIPVPPPP |
| SEQ ID NO: 2726 | PVPSAPPMIQYIPVPPPPP |
| SEQ ID NO: 2727 | VPSAPPMIQYIPVPPPPPI |
| SEQ ID NO: 2728 | PSAPPMIQYIPVPPPPPIG |
| SEQ ID NO: 2729 | RSQSRERRREILPAPVPSAP |
| SEQ ID NO: 2730 | SQSRERRREILPAPVPSAPP |
| SEQ ID NO: 2731 | QSRERRREILPAPVPSAPPM |
| SEQ ID NO: 2732 | SRERRREILPAPVPSAPPMI |
| SEQ ID NO: 2733 | RERRREILPAPVPSAPPMIQ |
| SEQ ID NO: 2734 | ERRREILPAPVPSAPPMIQY |
| SEQ ID NO: 2735 | RRREILPAPVPSAPPMIQYI |
| SEQ ID NO: 2736 | RREILPAPVPSAPPMIQYIP |
| SEQ ID NO: 2737 | REILPAPVPSAPPMIQYIPV |
| SEQ ID NO: 2738 | EILPAPVPSAPPMIQYIPVP |
| SEQ ID NO: 2739 | ILPAPVPSAPPMIQYIPVPP |
| SEQ ID NO: 2740 | LPAPVPSAPPMIQYIPVPPP |
| SEQ ID NO: 2741 | PAPVPSAPPMIQYIPVPPPP |
| SEQ ID NO: 2742 | APVPSAPPMIQYIPVPPPPP |
| SEQ ID NO: 2743 | PVPSAPPMIQYIPVPPPPPI |
| SEQ ID NO: 2744 | VPSAPPMIQYIPVPPPPPIG |
| SEQ ID NO: 2745 | PSAPPMIQYIPVPPPPPIGT |

TABLE 21
P(T/S)AP Motif Containing Peptides from
Hepatitis E Virus ORF-3 Protein
(GenBank Accession No. AAC35758)

| | |
|---|---|
| SEQ ID NO: 2746 | GVTRPSAP |
| SEQ ID NO: 2747 | VTRPSAPP |
| SEQ ID NO: 2748 | TRPSAPPL |
| SEQ ID NO: 2749 | RPSAPPLP |
| SEQ ID NO: 2750 | PSAPPLPH |
| SEQ ID NO: 2751 | LGVTRPSAP |
| SEQ ID NO: 2752 | GVTRPSAPP |
| SEQ ID NO: 2753 | VTRPSAPPL |
| SEQ ID NO: 2754 | TRPSAPPLP |
| SEQ ID NO: 2755 | RPSAPPLPH |
| SEQ ID NO: 2756 | PSAPPLPHV |
| SEQ ID NO: 2757 | PLGVTRPSAP |
| SEQ ID NO: 2758 | LGVTRPSAPP |
| SEQ ID NO: 2759 | GVTRPSAPPL |
| SEQ ID NO: 2760 | VTRPSAPPLP |
| SEQ ID NO: 2761 | TRPSAPPLPH |
| SEQ ID NO: 2762 | RPSAPPLPHV |
| SEQ ID NO: 2763 | PSAPPLPHVV |
| SEQ ID NO: 2764 | APLGVTRPSAP |
| SEQ ID NO: 2765 | PLGVTRPSAPP |
| SEQ ID NO: 2766 | LGVTRPSAPPL |
| SEQ ID NO: 2767 | GVTRPSAPPLP |
| SEQ ID NO: 2768 | VTRPSAPPLPH |
| SEQ ID NO: 2769 | TRPSAPPLPHV |
| SEQ ID NO: 2770 | RPSAPPLPHVV |
| SEQ ID NO: 2771 | PSAPPLPHVVD |
| SEQ ID NO: 2772 | SAPLGVTRPSAP |
| SEQ ID NO: 2773 | APLGVTRPSAPP |
| SEQ ID NO: 2774 | PLGVTRPSAPPL |
| SEQ ID NO: 2775 | LGVTRPSAPPLP |
| SEQ ID NO: 2776 | GVTRPSAPPLPH |
| SEQ ID NO: 2777 | VTRPSAPPLPHV |
| SEQ ID NO: 2778 | TRPSAPPLPHVV |
| SEQ ID NO: 2779 | RPSAPPLPHVVD |
| SEQ ID NO: 2780 | PSAPPLPHVVDL |
| SEQ ID NO: 2781 | HSAPLGVTRPSAP |
| SEQ ID NO: 2782 | SAPLGVTRPSAPP |
| SEQ ID NO: 2783 | APLGVTRPSAPPL |
| SEQ ID NO: 2784 | PLGVTRPSAPPLP |
| SEQ ID NO: 2785 | LGVTRPSAPPLPH |
| SEQ ID NO: 2786 | GVTRPSAPPLPHV |
| SEQ ID NO: 2787 | VTRPSAPPLPHVV |
| SEQ ID NO: 2788 | TRPSAPPLPHVVD |
| SEQ ID NO: 2789 | RPSAPPLPHVVDL |
| SEQ ID NO: 2790 | PSAPPLPHVVDLP |
| SEQ ID NO: 2791 | DHSAPLGVTRPSAP |
| SEQ ID NO: 2792 | HSAPLGVTRPSAPP |
| SEQ ID NO: 2793 | SAPLGVTRPSAPPL |
| SEQ ID NO: 2794 | APLGVTRPSAPPLP |
| SEQ ID NO: 2795 | PLGVTRPSAPPLPH |
| SEQ ID NO: 2796 | LGVTRPSAPPLPHV |
| SEQ ID NO: 2797 | GVTRPSAPPLPHVV |
| SEQ ID NO: 2798 | VTRPSAPPLPHVVD |
| SEQ ID NO: 2799 | TRPSAPPLPHVVDL |
| SEQ ID NO: 2800 | RPSAPPLPHVVDLP |
| SEQ ID NO: 2801 | PSAPPLPHVVDLPQ |
| SEQ ID NO: 2802 | PDHSAPLGVTRPSAP |
| SEQ ID NO: 2803 | DHSAPLGVTRPSAPP |
| SEQ ID NO: 2804 | HSAPLGVTRPSAPPL |
| SEQ ID NO: 2805 | SAPLGVTRPSAPPLP |
| SEQ ID NO: 2806 | APLGVTRPSAPPLPH |
| SEQ ID NO: 2807 | PLGVTRPSAPPLPHV |
| SEQ ID NO: 2808 | LGVTRPSAPPLPHVV |
| SEQ ID NO: 2809 | GVTRPSAPPLPHVVD |
| SEQ ID NO: 2810 | VTRPSAPPLPHVVDL |
| SEQ ID NO: 2811 | TRPSAPPLPHVVDLP |
| SEQ ID NO: 2812 | RPSAPPLPHVVDLPQ |
| SEQ ID NO: 2813 | PSAPPLPHVVDLPQL |
| SEQ ID NO: 2814 | LPDHSAPLGVTRPSAP |
| SEQ ID NO: 2815 | PDHSAPLGVTRPSAPP |
| SEQ ID NO: 2816 | DHSAPLGVTRPSAPPL |
| SEQ ID NO: 2817 | HSAPLGVTRPSAPPLP |
| SEQ ID NO: 2818 | SAPLGVTRPSAPPLPH |
| SEQ ID NO: 2819 | APLGVTRPSAPPLPHV |
| SEQ ID NO: 2820 | PLGVTRPSAPPLPHVV |
| SEQ ID NO: 2821 | LGVTRPSAPPLPHVVD |
| SEQ ID NO: 2822 | GVTRPSAPPLPHVVDL |
| SEQ ID NO: 2823 | VTRPSAPPLPHVVDLP |
| SEQ ID NO: 2824 | TRPSAPPLPHVVDLPQ |
| SEQ ID NO: 2825 | RPSAPPLPHVVDLPQL |
| SEQ ID NO: 2826 | PSAPPLPHVVDLPQLG |
| SEQ ID NO: 2827 | NLPDHSAPLGVTRPSAP |
| SEQ ID NO: 2828 | LPDHSAPLGVTRPSAPP |
| SEQ ID NO: 2829 | PDHSAPLGVTRPSAPPL |
| SEQ ID NO: 2830 | DHSAPLGVTRPSAPPLP |
| SEQ ID NO: 2831 | HSAPLGVTRPSAPPLPH |
| SEQ ID NO: 2832 | SAPLGVTRPSAPPLPHV |
| SEQ ID NO: 2833 | APLGVTRPSAPPLPHVV |
| SEQ ID NO: 2834 | PLGVTRPSAPPLPHVVD |
| SEQ ID NO: 2835 | LGVTRPSAPPLPHVVDL |
| SEQ ID NO: 2836 | GVTRPSAPPLPHVVDLP |
| SEQ ID NO: 2837 | VTRPSAPPLPHVVDLPQ |
| SEQ ID NO: 2838 | TRPSAPPLPHVVDLPQL |
| SEQ ID NO: 2839 | RPSAPPLPHVVDLPQLG |
| SEQ ID NO: 2840 | PSAPPLPHVVDLPQLGP |
| SEQ ID NO: 2841 | ANLPDHSAPLGVTRPSAP |
| SEQ ID NO: 2842 | NLPDHSAPLGVTRPSAPP |
| SEQ ID NO: 2843 | LPDHSAPLGVTRPSAPPL |
| SEQ ID NO: 2844 | PDHSAPLGVTRPSAPPLP |
| SEQ ID NO: 2845 | DHSAPLGVTRPSAPPLPH |
| SEQ ID NO: 2846 | HSAPLGVTRPSAPPLPHV |
| SEQ ID NO: 2847 | SAPLGVTRPSAPPLPHVV |
| SEQ ID NO: 2848 | APLGVTRPSAPPLPHVVD |
| SEQ ID NO: 2849 | PLGVTRPSAPPLPHVVDL |
| SEQ ID NO: 2850 | LGVTRPSAPPLPHVVDLP |
| SEQ ID NO: 2851 | GVTRPSAPPLPHVVDLPQ |
| SEQ ID NO: 2852 | VTRPSAPPLPHVVDLPQL |
| SEQ ID NO: 2853 | TRPSAPPLPHVVDLPQLG |
| SEQ ID NO: 2854 | RPSAPPLPHVVDLPQLGP |
| SEQ ID NO: 2855 | PSAPPLPHVVDLPQLGPR |
| SEQ ID NO: 2856 | FANLPDHSAPLGVTRPSAP |
| SEQ ID NO: 2857 | ANLPDHSAPLGVTRPSAPP |
| SEQ ID NO: 2858 | NLPDHSAPLGVTRPSAPPL |
| SEQ ID NO: 2859 | LPDHSAPLGVTRPSAPPLP |
| SEQ ID NO: 2860 | PDHSAPLGVTRPSAPPLPH |
| SEQ ID NO: 2861 | DHSAPLGVTRPSAPPLPHV |
| SEQ ID NO: 2862 | HSAPLGVTRPSAPPLPHVV |
| SEQ ID NO: 2863 | SAPLGVTRPSAPPLPHVVD |
| SEQ ID NO: 2864 | APLGVTRPSAPPLPHVVDL |
| SEQ ID NO: 2865 | PLGVTRPSAPPLPHVVDLP |
| SEQ ID NO: 2866 | LGVTRPSAPPLPHVVDLPQ |
| SEQ ID NO: 2867 | GVTRPSAPPLPHVVDLPQL |
| SEQ ID NO: 2868 | VTRPSAPPLPHVVDLPQLG |
| SEQ ID NO: 2869 | TRPSAPPLPHVVDLPQLGP |
| SEQ ID NO: 2870 | RPSAPPLPHVVDLPQLGPR |
| SEQ ID NO: 2871 | PSAPPLPHVVDLPQLGPRR |
| SEQ ID NO: 2872 | VFANLPDHSAPLGVTRPSAP |
| SEQ ID NO: 2873 | FANLPDHSAPLGVTRPSAPP |
| SEQ ID NO: 2874 | ANLPDHSAPLGVTRPSAPPL |
| SEQ ID NO: 2875 | NLPDHSAPLGVTRPSAPPLP |
| SEQ ID NO: 2876 | LPDHSAPLGVTRPSAPPLPH |
| SEQ ID NO: 2877 | PDHSAPLGVTRPSAPPLPHV |
| SEQ ID NO: 2878 | DHSAPLGVTRPSAPPLPHVV |
| SEQ ID NO: 2879 | HSAPLGVTRPSAPPLPHVVD |
| SEQ ID NO: 2880 | SAPLGVTRPSAPPLPHVVDL |
| SEQ ID NO: 2881 | APLGVTRPSAPPLPHVVDLP |
| SEQ ID NO: 2882 | PLGVTRPSAPPLPHVVDLPQ |
| SEQ ID NO: 2883 | LGVTRPSAPPLPHVVDLPQL |
| SEQ ID NO: 2884 | GVTRPSAPPLPHVVDLPQLG |
| SEQ ID NO: 2885 | VTRPSAPPLPHVVDLPQLGP |
| SEQ ID NO: 2886 | TRPSAPPLPHVVDLPQLGPR |
| SEQ ID NO: 2887 | RPSAPPLPHVVDLPQLGPRR |

TABLE 22
P(T/S)AP Motif Containing Peptides from
Hepatitis G Virus Polyprotein
(GenBank Accession No. AAB65834)

| | |
|---|---|
| SEQ ID NO: 2888 | PGFVPTAP |
| SEQ ID NO: 2889 | GFVPTAPV |
| SEQ ID NO: 2890 | FVPTAPVV |
| SEQ ID NO: 2891 | VPTAPVVI |
| SEQ ID NO: 2892 | PTAPVVIR |
| SEQ ID NO: 2893 | PPGFVPTAP |
| SEQ ID NO: 2894 | PGFVPTAPV |
| SEQ ID NO: 2895 | GFVPTAPVV |
| SEQ ID NO: 2896 | FVPTAPVVI |
| SEQ ID NO: 2897 | VPTAPVVIR |
| SEQ ID NO: 2898 | PTAPVVIRR |
| SEQ ID NO: 2899 | LPPGFVPTAP |
| SEQ ID NO: 2900 | PPGFVPTAPV |
| SEQ ID NO: 2901 | PGFVPTAPVV |
| SEQ ID NO: 2902 | GFVPTAPVVI |
| SEQ ID NO: 2903 | FVPTAPVVIR |
| SEQ ID NO: 2904 | VPTAPVVIRR |
| SEQ ID NO: 2905 | PTAPVVIRRC |
| SEQ ID NO: 2906 | HLPPGFVPTAP |
| SEQ ID NO: 2907 | LPPGFVPTAPV |
| SEQ ID NO: 2908 | PPGFVPTAPVV |
| SEQ ID NO: 2909 | PGFVPTAPVVI |
| SEQ ID NO: 2910 | GFVPTAPVVIR |
| SEQ ID NO: 2911 | FVPTAPVVIRR |
| SEQ ID NO: 2912 | VPTAPVVIRRC |
| SEQ ID NO: 2913 | PTAPVVIRRCG |
| SEQ ID NO: 2914 | NHLPPGFVPTAP |
| SEQ ID NO: 2915 | HLPPGFVPTAPV |
| SEQ ID NO: 2916 | LPPGFVPTAPVV |
| SEQ ID NO: 2917 | PPGFVPTAPVVI |
| SEQ ID NO: 2918 | PGFVPTAPVVIR |
| SEQ ID NO: 2919 | GFVPTAPVVIRR |
| SEQ ID NO: 2920 | FVPTAPVVIRRC |
| SEQ ID NO: 2921 | VPTAPVVIRRCG |
| SEQ ID NO: 2922 | PTAPVVIRRCGK |
| SEQ ID NO: 2923 | VNHLPPGFVPTAP |
| SEQ ID NO: 2924 | NHLPPGFVPTAPV |
| SEQ ID NO: 2925 | HLPPGFVPTAPVV |
| SEQ ID NO: 2926 | LPPGFVPTAPVVI |
| SEQ ID NO: 2927 | PPGFVPTAPVVIR |
| SEQ ID NO: 2928 | PGFVPTAPVVIRR |
| SEQ ID NO: 2929 | GFVPTAPVVIRRC |
| SEQ ID NO: 2930 | FVPTAPVVIRRCG |
| SEQ ID NO: 2931 | VPTAPVVIRRCGK |
| SEQ ID NO: 2932 | PTAPVVIRRCGKG |
| SEQ ID NO: 2933 | DVNHLPPGFVPTAP |
| SEQ ID NO: 2934 | VNHLPPGFVPTAPV |
| SEQ ID NO: 2935 | NHLPPGFVPTAPVV |
| SEQ ID NO: 2936 | HLPPGFVPTAPVVI |
| SEQ ID NO: 2937 | LPPGFVPTAPVVIR |
| SEQ ID NO: 2938 | PPGFVPTAPVVIRR |
| SEQ ID NO: 2939 | PGFVPTAPVVIRRC |
| SEQ ID NO: 2940 | GFVPTAPVVIRRCG |
| SEQ ID NO: 2941 | FVPTAPVVIRRCGK |
| SEQ ID NO: 2942 | VPTAPVVIRRCGKG |
| SEQ ID NO: 2943 | PTAPVVIRRCGKGF |
| SEQ ID NO: 2944 | QDVNHLPPGFVPTAP |
| SEQ ID NO: 2945 | DVNHLPPGFVPTAPV |
| SEQ ID NO: 2946 | VNHLPPGFVPTAPVV |
| SEQ ID NO: 2947 | NHLPPGFVPTAPVVI |
| SEQ ID NO: 2948 | HLPPGFVPTAPVVIR |
| SEQ ID NO: 2949 | LPPGFVPTAPVVIRR |
| SEQ ID NO: 2950 | PPGFVPTAPVVIRRC |
| SEQ ID NO: 2951 | PGFVPTAPVVIRRCG |
| SEQ ID NO: 2952 | GFVPTAPVVIRRCGK |
| SEQ ID NO: 2953 | FVPTAPVVIRRCGKG |
| SEQ ID NO: 2954 | VPTAPVVIRRCGKGF |
| SEQ ID NO: 2955 | PTAPVVIRRCGKGFL |
| SEQ ID NO: 2956 | FQDVNHLPPGFVPTAP |
| SEQ ID NO: 2957 | QDVNHLPPGFVPTAPV |
| SEQ ID NO: 2958 | DVNHLPPGFVPTAPVV |
| SEQ ID NO: 2959 | VNHLPPGFVPTAPVVI |
| SEQ ID NO: 2960 | NHLPPGFVPTAPVVIR |
| SEQ ID NO: 2961 | HLPPGFVPTAPVVIRR |
| SEQ ID NO: 2962 | LPPGFVPTAPVVIRRC |
| SEQ ID NO: 2963 | PPGFVPTAPVVIRRCG |
| SEQ ID NO: 2964 | PGFVPTAPVVIRRCGK |
| SEQ ID NO: 2965 | GFVPTAPVVIRRCGKG |
| SEQ ID NO: 2966 | FVPTAPVVIRRCGKGF |
| SEQ ID NO: 2967 | VPTAPVVIRRCGKGFL |
| SEQ ID NO: 2968 | PTAPVVIRRCGKGFLG |
| SEQ ID NO: 2969 | VFQDVNHLPPGFVPTAP |
| SEQ ID NO: 2970 | FQDVNHLPPGFVPTAPV |
| SEQ ID NO: 2971 | QDVNHLPPGFVPTAPVV |
| SEQ ID NO: 2972 | DVNHLPPGFVPTAPVVI |
| SEQ ID NO: 2973 | VNHLPPGFVPTAPVVIR |
| SEQ ID NO: 2974 | NHLPPGFVPTAPVVIRR |
| SEQ ID NO: 2975 | HLPPGFVPTAPVVIRRC |
| SEQ ID NO: 2976 | LPPGFVPTAPVVIRRCG |
| SEQ ID NO: 2977 | PPGFVPTAPVVIRRCGK |
| SEQ ID NO: 2978 | PGFVPTAPVVIRRCGKG |
| SEQ ID NO: 2979 | GFVPTAPVVIRRCGKGF |
| SEQ ID NO: 2980 | FVPTAPVVIRRCGKGFL |
| SEQ ID NO: 2981 | VPTAPVVIRRCGKGFLG |
| SEQ ID NO: 2982 | PTAPVVIRRCGKGFLGV |
| SEQ ID NO: 2983 | GVFQDVNHLPPGFVPTAP |
| SEQ ID NO: 2984 | VFQDVNHLPPGFVPTAPV |
| SEQ ID NO: 2985 | FQDVNHLPPGFVPTAPVV |
| SEQ ID NO: 2986 | QDVNHLPPGFVPTAPVVI |
| SEQ ID NO: 2987 | DVNHLPPGFVPTAPVVIR |
| SEQ ID NO: 2988 | VNHLPPGFVPTAPVVIRR |
| SEQ ID NO: 2989 | NHLPPGFVPTAPVVIRRC |
| SEQ ID NO: 2990 | HLPPGFVPTAPVVIRRCG |
| SEQ ID NO: 2991 | LPPGFVPTAPVVIRRCGK |
| SEQ ID NO: 2992 | PPGFVPTAPVVIRRCGKG |
| SEQ ID NO: 2993 | PGFVPTAPVVIRRCGKGF |
| SEQ ID NO: 2994 | GFVPTAPVVIRRCGKGFL |
| SEQ ID NO: 2995 | FVPTAPVVIRRCGKGFLG |
| SEQ ID NO: 2996 | VPTAPVVIRRCGKGFLGV |
| SEQ ID NO: 2997 | PTAPVVIRRCGKGFLGVT |
| SEQ ID NO: 2998 | IGVFQDVNHLPPGFVPTAP |
| SEQ ID NO: 2999 | GVFQDVNHLPPGFVPTAPV |
| SEQ ID NO: 3000 | VFQDVNHLPPGFVPTAPVV |
| SEQ ID NO: 3001 | FQDVNHLPPGFVPTAPVVI |
| SEQ ID NO: 3002 | QDVNHLPPGFVPTAPVVIR |
| SEQ ID NO: 3003 | DVNHLPPGFVPTAPVVIRR |
| SEQ ID NO: 3004 | VNHLPPGFVPTAPVVIRRC |
| SEQ ID NO: 3005 | NHLPPGFVPTAPVVIRRCG |
| SEQ ID NO: 3006 | HLPPGFVPTAPVVIRRCGK |
| SEQ ID NO: 3007 | LPPGFVPTAPVVIRRCGKG |
| SEQ ID NO: 3008 | PPGFVPTAPVVIRRCGKGF |
| SEQ ID NO: 3009 | PGFVPTAPVVIRRCGKGFL |
| SEQ ID NO: 3010 | GFVPTAPVVIRRCGKGFLG |
| SEQ ID NO: 3011 | FVPTAPVVIRRCGKGFLGV |
| SEQ ID NO: 3012 | VPTAPVVIRRCGKGFLGVT |
| SEQ ID NO: 3013 | PTAPVVIRRCGKGFLGVTK |
| SEQ ID NO: 3014 | LIGVFQDVNHLPPGFVPTAP |
| SEQ ID NO: 3015 | IGVFQDVNHLPPGFVPTAPV |
| SEQ ID NO: 3016 | GVFQDVNHLPPGFVPTAPVV |
| SEQ ID NO: 3017 | VFQDVNHLPPGFVPTAPVVI |
| SEQ ID NO: 3018 | FQDVNHLPPGFVPTAPVVIR |
| SEQ ID NO: 3019 | QDVNHLPPGFVPTAPVVIRR |
| SEQ ID NO: 3020 | DVNHLPPGFVPTAPVVIRRC |
| SEQ ID NO: 3021 | VNHLPPGFVPTAPVVIRRCG |
| SEQ ID NO: 3022 | NHLPPGFVPTAPVVIRRCGK |
| SEQ ID NO: 3023 | HLPPGFVPTAPVVIRRCGKG |
| SEQ ID NO: 3024 | LPPGFVPTAPVVIRRCGKGF |
| SEQ ID NO: 3025 | PPGFVPTAPVVIRRCGKGFL |
| SEQ ID NO: 3026 | PGFVPTAPVVIRRCGKGFLG |
| SEQ ID NO: 3027 | GFVPTAPVVIRRCGKGFLGV |
| SEQ ID NO: 3028 | FVPTAPVVIRRCGKGFLGVT |
| SEQ ID NO: 3029 | VPTAPVVIRRCGKGFLGVTK |
| SEQ ID NO: 3030 | PTAPVVIRRCGKGFLGVTKA |

TABLE 23
P(T/S)AP Motif Containing Peptides from Human
Herpesvirus 5 UL32
(GenBank Accession No. AAG31644)

| | |
|---|---|
| SEQ ID NO: 3031 | SPWAPTAP |
| SEQ ID NO: 3032 | PWAPTAPL |
| SEQ ID NO: 3033 | WAPTAPLP |
| SEQ ID NO: 3034 | APTAPLPG |
| SEQ ID NO: 3035 | PTAPLPGD |
| SEQ ID NO: 3036 | NSPWAPTAP |
| SEQ ID NO: 3037 | SPWAPTAPL |
| SEQ ID NO: 3038 | PWAPTAPLP |
| SEQ ID NO: 3039 | WAPTAPLPG |
| SEQ ID NO: 3040 | APTAPLPGD |
| SEQ ID NO: 3041 | PTAPLPGDM |
| SEQ ID NO: 3042 | GNSPWAPTAP |
| SEQ ID NO: 3043 | NSPWAPTAPL |
| SEQ ID NO: 3044 | SPWAPTAPLP |
| SEQ ID NO: 3045 | PWAPTAPLPG |
| SEQ ID NO: 3046 | WAPTAPLPGD |
| SEQ ID NO: 3047 | APTAPLPGDM |
| SEQ ID NO: 3048 | PTAPLPGDMN |
| SEQ ID NO: 3049 | NGNSPWAPTAP |
| SEQ ID NO: 3050 | GNSPWAPTAPL |
| SEQ ID NO: 3051 | NSPWAPTAPLP |
| SEQ ID NO: 3052 | SPWAPTAPLPG |
| SEQ ID NO: 3053 | PWAPTAPLPGD |
| SEQ ID NO: 3054 | WAPTAPLPGDM |
| SEQ ID NO: 3055 | APTAPLPGDMN |
| SEQ ID NO: 3056 | PTAPLPGDMNP |
| SEQ ID NO: 3057 | VNGNSPWAPTAP |
| SEQ ID NO: 3058 | NGNSPWAPTAPL |
| SEQ ID NO: 3059 | GNSPWAPTAPLP |
| SEQ ID NO: 3060 | NSPWAPTAPLPG |
| SEQ ID NO: 3061 | SPWAPTAPLPGD |
| SEQ ID NO: 3062 | PWAPTAPLPGDM |
| SEQ ID NO: 3063 | WAPTAPLPGDMN |
| SEQ ID NO: 3064 | APTAPLPGDMNP |
| SEQ ID NO: 3065 | PTAPLPGDMNPA |
| SEQ ID NO: 3066 | PVNGNSPWAPTAP |
| SEQ ID NO: 3067 | VNGNSPWAPTAPL |
| SEQ ID NO: 3068 | NGNSPWAPTAPLP |
| SEQ ID NO: 3069 | GNSPWAPTAPLPG |
| SEQ ID NO: 3070 | NSPWAPTAPLPGD |
| SEQ ID NO: 3071 | SPWAPTAPLPGDM |
| SEQ ID NO: 3072 | PWAPTAPLPGDMN |
| SEQ ID NO: 3073 | WAPTAPLPGDMNP |
| SEQ ID NO: 3074 | APTAPLPGDMNPA |
| SEQ ID NO: 3075 | PTAPLPGDMNPAN |
| SEQ ID NO: 3076 | TPVNGNSPWAPTAP |
| SEQ ID NO: 3077 | PVNGNSPWAPTAPL |
| SEQ ID NO: 3078 | VNGNSPWAPTAPLP |
| SEQ ID NO: 3079 | NGNSPWAPTAPLPG |
| SEQ ID NO: 3080 | GNSPWAPTAPLPGD |
| SEQ ID NO: 3081 | NSPWAPTAPLPGDM |
| SEQ ID NO: 3082 | SPWAPTAPLPGDMN |
| SEQ ID NO: 3083 | PWAPTAPLPGDMNP |
| SEQ ID NO: 3084 | WAPTAPLPGDMNPA |
| SEQ ID NO: 3085 | APTAPLPGDMNPAN |
| SEQ ID NO: 3086 | PTAPLPGDMNPANW |
| SEQ ID NO: 3087 | QTPVNGNSPWAPTAP |
| SEQ ID NO: 3088 | TPVNGNSPWAPTAPL |
| SEQ ID NO: 3089 | PVNGNSPWAPTAPLP |
| SEQ ID NO: 3090 | VNGNSPWAPTAPLPG |
| SEQ ID NO: 3091 | NGNSPWAPTAPLPGD |
| SEQ ID NO: 3092 | GNSPWAPTAPLPGDM |
| SEQ ID NO: 3093 | NSPWAPTAPLPGDMN |
| SEQ ID NO: 3094 | SPWAPTAPLPGDMNP |
| SEQ ID NO: 3095 | PWAPTAPLPGDMNPA |
| SEQ ID NO: 3096 | WAPTAPLPGDMNPAN |
| SEQ ID NO: 3097 | APTAPLPGDMNPANW |
| SEQ ID NO: 3098 | PTAPLPGDMNPANWP |
| SEQ ID NO: 3099 | TQTPVNGNSPWAPTAP |
| SEQ ID NO: 3100 | QTPVNGNSPWAPTAPL |
| SEQ ID NO: 3101 | TPVNGNSPWAPTAPLP |
| SEQ ID NO: 3102 | PVNGNSPWAPTAPLPG |
| SEQ ID NO: 3103 | VNGNSPWAPTAPLPGD |
| SEQ ID NO: 3104 | NGNSPWAPTAPLPGDM |
| SEQ ID NO: 3105 | GNSPWAPTAPLPGDMN |
| SEQ ID NO: 3106 | NSPWAPTAPLPGDMNP |
| SEQ ID NO: 3107 | SPWAPTAPLPGDMNPA |
| SEQ ID NO: 3108 | PWAPTAPLPGDMNPAN |
| SEQ ID NO: 3109 | WAPTAPLPGDMNPANW |
| SEQ ID NO: 3110 | APTAPLPGDMNPANWP |
| SEQ ID NO: 3111 | PTAPLPGDMNPANWPR |
| SEQ ID NO: 3112 | GTQTPVNGNSPWAPTAP |
| SEQ ID NO: 3113 | TQTPVNGNSPWAPTAPL |
| SEQ ID NO: 3114 | QTPVNGNSPWAPTAPLP |
| SEQ ID NO: 3115 | TPVNGNSPWAPTAPLPG |
| SEQ ID NO: 3116 | PVNGNSPWAPTAPLPGD |
| SEQ ID NO: 3117 | VNGNSPWAPTAPLPGDM |
| SEQ ID NO: 3118 | NGNSPWAPTAPLPGDMN |
| SEQ ID NO: 3119 | GNSPWAPTAPLPGDMNP |
| SEQ ID NO: 3120 | NSPWAPTAPLPGDMNPA |
| SEQ ID NO: 3121 | SPWAPTAPLPGDMNPAN |
| SEQ ID NO: 3122 | PWAPTAPLPGDMNPANW |
| SEQ ID NO: 3123 | WAPTAPLPGDMNPANWP |
| SEQ ID NO: 3124 | APTAPLPGDMNPANWPR |
| SEQ ID NO: 3125 | PTAPLPGDMNPANWPRE |
| SEQ ID NO: 3126 | AGTQTPVNGNSPWAPTAP |
| SEQ ID NO: 3127 | GTQTPVNGNSPWAPTAPL |
| SEQ ID NO: 3128 | TQTPVNGNSPWAPTAPLP |
| SEQ ID NO: 3129 | QTPVNGNSPWAPTAPLPG |
| SEQ ID NO: 3130 | TPVNGNSPWAPTAPLPGD |
| SEQ ID NO: 3131 | PVNGNSPWAPTAPLPGDM |
| SEQ ID NO: 3132 | VNGNSPWAPTAPLPGDMN |
| SEQ ID NO: 3133 | NGNSPWAPTAPLPGDMNP |
| SEQ ID NO: 3134 | GNSPWAPTAPLPGDMNPA |
| SEQ ID NO: 3135 | NSPWAPTAPLPGDMNPAN |
| SEQ ID NO: 3136 | SPWAPTAPLPGDMNPANW |
| SEQ ID NO: 3137 | PWAPTAPLPGDMNPANWP |
| SEQ ID NO: 3138 | WAPTAPLPGDMNPANWPR |
| SEQ ID NO: 3139 | APTAPLPGDMNPANWPRE |
| SEQ ID NO: 3140 | PTAPLPGDMNPANWPRER |
| SEQ ID NO: 3141 | FAGTQTPVNGNSPWAPTAP |
| SEQ ID NO: 3142 | AGTQTPVNGNSPWAPTAPL |
| SEQ ID NO: 3143 | GTQTPVNGNSPWAPTAPLP |
| SEQ ID NO: 3144 | TQTPVNGNSPWAPTAPLPG |
| SEQ ID NO: 3145 | QTPVNGNSPWAPTAPLPGD |
| SEQ ID NO: 3146 | TPVNGNSPWAPTAPLPGDM |
| SEQ ID NO: 3147 | PVNGNSPWAPTAPLPGDMN |
| SEQ ID NO: 3148 | VNGNSPWAPTAPLPGDMNP |
| SEQ ID NO: 3149 | NGNSPWAPTAPLPGDMNPA |
| SEQ ID NO: 3150 | GNSPWAPTAPLPGDMNPAN |
| SEQ ID NO: 3151 | NSPWAPTAPLPGDMNPANW |
| SEQ ID NO: 3152 | SPWAPTAPLPGDMNPANWP |
| SEQ ID NO: 3153 | PWAPTAPLPGDMNPANWPR |
| SEQ ID NO: 3154 | WAPTAPLPGDMNPANWPRE |
| SEQ ID NO: 3155 | APTAPLPGDMNPANWPRER |
| SEQ ID NO: 3156 | PTAPLPGDMNPANWPRERA |
| SEQ ID NO: 3157 | TFAGTQTPVNGNSPWAPTAP |
| SEQ ID NO: 3158 | FAGTQTPVNGNSPWAPTAPL |
| SEQ ID NO: 3159 | AGTQTPVNGNSPWAPTAPLP |
| SEQ ID NO: 3160 | GTQTPVNGNSPWAPTAPLPG |
| SEQ ID NO: 3161 | TQTPVNGNSPWAPTAPLPGD |
| SEQ ID NO: 3162 | QTPVNGNSPWAPTAPLPGDM |
| SEQ ID NO: 3163 | TPVNGNSPWAPTAPLPGDMN |
| SEQ ID NO: 3164 | PVNGNSPWAPTAPLPGDMNP |
| SEQ ID NO: 3165 | VNGNSPWAPTAPLPGDMNPA |
| SEQ ID NO: 3166 | NGNSPWAPTAPLPGDMNPAN |
| SEQ ID NO: 3167 | GNSPWAPTAPLPGDMNPANW |
| SEQ ID NO: 3168 | NSPWAPTAPLPGDMNPANWP |
| SEQ ID NO: 3169 | SPWAPTAPLPGDMNPANWPR |
| SEQ ID NO: 3170 | PWAPTAPLPGDMNPANWPRE |
| SEQ ID NO: 3171 | WAPTAPLPGDMNPANWPRER |
| SEQ ID NO: 3172 | APTAPLPGDMNPANWPRERA |
| SEQ ID NO: 3173 | PTAPLPGDMNPANWPRERAW |

TABLE 24
P(T/S)AP Motif Containing Peptides from
Human Parechovirus 2 Polyprotein
(GenBank Accession No. NP_046804)

| | |
|---|---|
| SEQ ID NO: 3174 | LTQHPSAP |
| SEQ ID NO: 3175 | TQHPSAPT |
| SEQ ID NO: 3176 | QHPSAPTL |
| SEQ ID NO: 3177 | HPSAPTLP |
| SEQ ID NO: 3178 | PSAPTLPF |
| SEQ ID NO: 3179 | NLTQHPSAP |
| SEQ ID NO: 3180 | LTQHPSAPT |
| SEQ ID NO: 3181 | TQHPSAPTL |
| SEQ ID NO: 3182 | QHPSAPTLP |
| SEQ ID NO: 3183 | HPSAPTLPF |
| SEQ ID NO: 3184 | PSAPTLPFT |
| SEQ ID NO: 3185 | TNLTQHPSAP |
| SEQ ID NO: 3186 | NLTQHPSAPT |
| SEQ ID NO: 3187 | LTQHPSAPTL |
| SEQ ID NO: 3188 | TQHPSAPTLP |
| SEQ ID NO: 3189 | QHPSAPTLPF |
| SEQ ID NO: 3190 | HPSAPTLPFT |
| SEQ ID NO: 3191 | PSAPTLPFTP |
| SEQ ID NO: 3192 | TTNLTQHPSAP |
| SEQ ID NO: 3193 | TNLTQHPSAPT |
| SEQ ID NO: 3194 | NLTQHPSAPTL |
| SEQ ID NO: 3195 | LTQHPSAPTLP |
| SEQ ID NO: 3196 | TQHPSAPTLPF |
| SEQ ID NO: 3197 | QHPSAPTLPFT |
| SEQ ID NO: 3198 | HPSAPTLPFTP |
| SEQ ID NO: 3199 | PSAPTLPFTPD |
| SEQ ID NO: 3200 | NTTNLTQHPSAP |
| SEQ ID NO: 3201 | TTNLTQHPSAPT |
| SEQ ID NO: 3202 | TNLTQHPSAPTL |
| SEQ ID NO: 3203 | NLTQHPSAPTLP |
| SEQ ID NO: 3204 | LTQHPSAPTLPF |
| SEQ ID NO: 3205 | TQHPSAPTLPFT |
| SEQ ID NO: 3206 | QHPSAPTLPFTP |
| SEQ ID NO: 3207 | HPSAPTLPFTPD |
| SEQ ID NO: 3208 | PSAPTLPFTPDF |
| SEQ ID NO: 3209 | VNTTNLTQHPSAP |
| SEQ ID NO: 3210 | NTTNLTQHPSAPT |
| SEQ ID NO: 3211 | TTNLTQHPSAPTL |
| SEQ ID NO: 3212 | TNLTQHPSAPTLP |
| SEQ ID NO: 3213 | NLTQHPSAPTLPF |
| SEQ ID NO: 3214 | LTQHPSAPTLPFT |
| SEQ ID NO: 3215 | TQHPSAPTLPFTP |
| SEQ ID NO: 3216 | QHPSAPTLPFTPD |
| SEQ ID NO: 3217 | HPSAPTLPFTPDF |
| SEQ ID NO: 3218 | PSAPTLPFTPDFS |
| SEQ ID NO: 3219 | TVNTTNLTQHPSAP |
| SEQ ID NO: 3220 | VNTTNLTQHPSAPT |
| SEQ ID NO: 3221 | NTTNLTQHPSAPTL |
| SEQ ID NO: 3222 | TTNLTQHPSAPTLP |
| SEQ ID NO: 3223 | TNLTQHPSAPTLPF |
| SEQ ID NO: 3224 | NLTQHPSAPTLPFT |
| SEQ ID NO: 3225 | LTQHPSAPTLPFTP |
| SEQ ID NO: 3226 | TQHPSAPTLPFTPD |
| SEQ ID NO: 3227 | QHPSAPTLPFTPDF |
| SEQ ID NO: 3228 | HPSAPTLPFTPDFS |
| SEQ ID NO: 3229 | PSAPTLPFTPDFSN |
| SEQ ID NO: 3230 | TTVNTTNLTQHPSAP |
| SEQ ID NO: 3231 | TVNTTNLTQHPSAPT |
| SEQ ID NO: 3232 | VNTTNLTQHPSAPTL |
| SEQ ID NO: 3233 | NTTNLTQHPSAPTLP |
| SEQ ID NO: 3234 | TTNLTQHPSAPTLPF |
| SEQ ID NO: 3235 | TNLTQHPSAPTLPFT |
| SEQ ID NO: 3236 | NLTQHPSAPTLPFTP |
| SEQ ID NO: 3237 | LTQHPSAPTLPFTPD |
| SEQ ID NO: 3238 | TQHPSAPTLPFTPDF |
| SEQ ID NO: 3239 | QHPSAPTLPFTPDFS |
| SEQ ID NO: 3240 | HPSAPTLPFTPDFSN |
| SEQ ID NO: 3241 | PSAPTLPFTPDFSNV |
| SEQ ID NO: 3242 | TTTVNTTNLTQHPSAP |
| SEQ ID NO: 3243 | TTVNTTNLTQHPSAPT |
| SEQ ID NO: 3244 | TVNTTNLTQHPSAPTL |
| SEQ ID NO: 3245 | VNTTNLTQHPSAPTLP |
| SEQ ID NO: 3246 | NTTNLTQHPSAPTLPF |
| SEQ ID NO: 3247 | TTNLTQHPSAPTLPFT |
| SEQ ID NO: 3248 | TNLTQHPSAPTLPFTP |
| SEQ ID NO: 3249 | NLTQHPSAPTLPFTPD |
| SEQ ID NO: 3250 | LTQHPSAPTLPFTPDF |
| SEQ ID NO: 3251 | TQHPSAPTLPFTPDFS |
| SEQ ID NO: 3252 | QHPSAPTLPFTPDFSN |
| SEQ ID NO: 3253 | HPSAPTLPFTPDFSNV |
| SEQ ID NO: 3254 | PSAPTLPFTPDFSNVD |
| SEQ ID NO: 3255 | ATTTVNTTNLTQHPSAP |
| SEQ ID NO: 3256 | TTTVNTTNLTQHPSAPT |
| SEQ ID NO: 3257 | TTVNTTNLTQHPSAPTL |
| SEQ ID NO: 3258 | TVNTTNLTQHPSAPTLP |
| SEQ ID NO: 3259 | VNTTNLTQHPSAPTLPF |
| SEQ ID NO: 3260 | NTTNLTQHPSAPTLPFT |
| SEQ ID NO: 3261 | TTNLTQHPSAPTLPFTP |
| SEQ ID NO: 3262 | TNLTQHPSAPTLPFTPD |
| SEQ ID NO: 3263 | NLTQHPSAPTLPFTPDF |
| SEQ ID NO: 3264 | LTQHPSAPTLPFTPDFS |
| SEQ ID NO: 3265 | TQHPSAPTLPFTPDFSN |
| SEQ ID NO: 3266 | QHPSAPTLPFTPDFSNV |
| SEQ ID NO: 3267 | HPSAPTLPFTPDFSNVD |
| SEQ ID NO: 3268 | PSAPTLPFTPDFSNVDT |
| SEQ ID NO: 3269 | QATTTVNTTNLTQHPSAP |
| SEQ ID NO: 3270 | ATTTVNTTNLTQHPSAPT |
| SEQ ID NO: 3271 | TTTVNTTNLTQHPSAPTL |
| SEQ ID NO: 3272 | TTVNTTNLTQHPSAPTLP |
| SEQ ID NO: 3273 | TVNTTNLTQHPSAPTLPF |
| SEQ ID NO: 3274 | VNTTNLTQHPSAPTLPFT |
| SEQ ID NO: 3275 | NTTNLTQHPSAPTLPFTP |
| SEQ ID NO: 3276 | TTNLTQHPSAPTLPFTPD |
| SEQ ID NO: 3277 | TNLTQHPSAPTLPFTPDF |
| SEQ ID NO: 3278 | NLTQHPSAPTLPFTPDFS |
| SEQ ID NO: 3279 | LTQHPSAPTLPFTPDFSN |
| SEQ ID NO: 3280 | TQHPSAPTLPFTPDFSNV |
| SEQ ID NO: 3281 | QHPSAPTLPFTPDFSNVD |
| SEQ ID NO: 3282 | HPSAPTLPFTPDFSNVDT |
| SEQ ID NO: 3283 | PSAPTLPFTPDFSNVDTF |
| SEQ ID NO: 3284 | VQATTTVNTTNLTQHPSAP |
| SEQ ID NO: 3285 | QATTTVNTTNLTQHPSAPT |
| SEQ ID NO: 3286 | ATTTVNTTNLTQHPSAPTL |
| SEQ ID NO: 3287 | TTTVNTTNLTQHPSAPTLP |
| SEQ ID NO: 3288 | TTVNTTNLTQHPSAPTLPF |
| SEQ ID NO: 3289 | TVNTTNLTQHPSAPTLPFT |
| SEQ ID NO: 3290 | VNTTNLTQHPSAPTLPFTP |
| SEQ ID NO: 3291 | NTTNLTQHPSAPTLPFTPD |
| SEQ ID NO: 3292 | TTNLTQHPSAPTLPFTPDF |
| SEQ ID NO: 3293 | TNLTQHPSAPTLPFTPDFS |
| SEQ ID NO: 3294 | NLTQHPSAPTLPFTPDFSN |
| SEQ ID NO: 3295 | LTQHPSAPTLPFTPDFSNV |
| SEQ ID NO: 3296 | TQHPSAPTLPFTPDFSNVD |
| SEQ ID NO: 3297 | QHPSAPTLPFTPDFSNVDT |
| SEQ ID NO: 3298 | HPSAPTLPFTPDFSNVDTF |
| SEQ ID NO: 3299 | PSAPTLPFTPDFSNVDTFH |
| SEQ ID NO: 3300 | VVQATTTVNTTNLTQHPSAP |
| SEQ ID NO: 3301 | VQATTTVNTTNLTQHPSAPT |
| SEQ ID NO: 3302 | QATTTVNTTNLTQHPSAPTL |
| SEQ ID NO: 3303 | ATTTVNTTNLTQHPSAPTLP |
| SEQ ID NO: 3304 | TTTVNTTNLTQHPSAPTLPF |
| SEQ ID NO: 3305 | TTVNTTNLTQHPSAPTLPFT |
| SEQ ID NO: 3306 | TVNTTNLTQHPSAPTLPFTP |
| SEQ ID NO: 3307 | VNTTNLTQHPSAPTLPFTPD |
| SEQ ID NO: 3308 | NTTNLTQHPSAPTLPFTPDF |
| SEQ ID NO: 3309 | TTNLTQHPSAPTLPFTPDFS |
| SEQ ID NO: 3310 | TNLTQHPSAPTLPFTPDFSN |
| SEQ ID NO: 3311 | NLTQHPSAPTLPFTPDFSNV |
| SEQ ID NO: 3312 | LTQHPSAPTLPFTPDFSNVD |
| SEQ ID NO: 3313 | TQHPSAPTLPFTPDFSNVDT |
| SEQ ID NO: 3314 | QHPSAPTLPFTPDFSNVDTF |
| SEQ ID NO: 3315 | HPSAPTLPFTPDFSNVDTFH |
| SEQ ID NO: 3316 | PSAPTLPFTPDFSNVDTFHS |

TABLE 25
P(T/S)AP Motif Containing Peptides
from Semliki Forest Virus Polyprotein
(GenBank Accession No. CAA76683)

| | |
|---|---|
| SEQ ID NO: 3317 | LKIRPSAP |
| SEQ ID NO: 3318 | KIRPSAPY |
| SEQ ID NO: 3319 | IRPSAPYK |
| SEQ ID NO: 3320 | RPSAPYKT |
| SEQ ID NO: 3321 | PSAPYKTT |
| SEQ ID NO: 3322 | GLKIRPSAP |
| SEQ ID NO: 3323 | LKIRPSAPY |
| SEQ ID NO: 3324 | KIRPSAPYK |
| SEQ ID NO: 3325 | IRPSAPYKT |
| SEQ ID NO: 3326 | RPSAPYKTT |
| SEQ ID NO: 3327 | PSAPYKTTV |
| SEQ ID NO: 3328 | EGLKIRPSAP |
| SEQ ID NO: 3329 | GLKIRPSAPY |
| SEQ ID NO: 3330 | LKIRPSAPYK |
| SEQ ID NO: 3331 | KIRPSAPYKT |
| SEQ ID NO: 3332 | IRPSAPYKTT |
| SEQ ID NO: 3333 | RPSAPYKTTV |
| SEQ ID NO: 3334 | PSAPYKTTVV |
| SEQ ID NO: 3335 | YEGLKIRPSAP |
| SEQ ID NO: 3336 | EGLKIRPSAPY |
| SEQ ID NO: 3337 | GLKIRPSAPYK |
| SEQ ID NO: 3338 | LKIRPSAPYKT |
| SEQ ID NO: 3339 | KIRPSAPYKTT |
| SEQ ID NO: 3340 | IRPSAPYKTTV |
| SEQ ID NO: 3341 | RPSAPYKTTVV |
| SEQ ID NO: 3342 | PSAPYKTTVVG |
| SEQ ID NO: 3343 | AYEGLKIRPSAP |
| SEQ ID NO: 3344 | YEGLKIRPSAPY |
| SEQ ID NO: 3345 | EGLKIRPSAPYK |
| SEQ ID NO: 3346 | GLKIRPSAPYKT |
| SEQ ID NO: 3347 | LKIRPSAPYKTT |
| SEQ ID NO: 3348 | KIRPSAPYKTTV |
| SEQ ID NO: 3349 | IRPSAPYKTTVV |
| SEQ ID NO: 3350 | RPSAPYKTTVVG |
| SEQ ID NO: 3351 | PSAPYKTTVVGV |
| SEQ ID NO: 3352 | FAYEGLKIRPSAP |
| SEQ ID NO: 3353 | AYEGLKIRPSAPY |
| SEQ ID NO: 3354 | YEGLKIRPSAPYK |
| SEQ ID NO: 3355 | EGLKIRPSAPYKT |
| SEQ ID NO: 3356 | GLKIRPSAPYKTT |
| SEQ ID NO: 3357 | LKIRPSAPYKTTV |
| SEQ ID NO: 3358 | KIRPSAPYKTTVV |
| SEQ ID NO: 3359 | IRPSAPYKTTVVG |
| SEQ ID NO: 3360 | RPSAPYKTTVVGV |
| SEQ ID NO: 3361 | PSAPYKTTVVGVF |
| SEQ ID NO: 3362 | EFAYEGLKIRPSAP |
| SEQ ID NO: 3363 | FAYEGLKIRPSAPY |
| SEQ ID NO: 3364 | AYEGLKIRPSAPYK |
| SEQ ID NO: 3365 | YEGLKIRPSAPYKT |
| SEQ ID NO: 3366 | EGLKIRPSAPYKTT |
| SEQ ID NO: 3367 | GLKIRPSAPYKTTV |
| SEQ ID NO: 3368 | LKIRPSAPYKTTVV |
| SEQ ID NO: 3369 | KIRPSAPYKTTVVG |
| SEQ ID NO: 3370 | IRPSAPYKTTVVGV |
| SEQ ID NO: 3371 | RPSAPYKTTVVGVF |
| SEQ ID NO: 3372 | PSAPYKTTVVGVFG |
| SEQ ID NO: 3373 | HEFAYEGLKIRPSAP |
| SEQ ID NO: 3374 | EFAYEGLKIRPSAPY |
| SEQ ID NO: 3375 | FAYEGLKIRPSAPYK |
| SEQ ID NO: 3376 | AYEGLKIRPSAPYKT |
| SEQ ID NO: 3377 | YEGLKIRPSAPYKTT |
| SEQ ID NO: 3378 | EGLKIRPSAPYKTTV |
| SEQ ID NO: 3379 | GLKIRPSAPYKTTVV |
| SEQ ID NO: 3380 | LKIRPSAPYKTTVVG |
| SEQ ID NO: 3381 | KIRPSAPYKTTVVGV |
| SEQ ID NO: 3382 | IRPSAPYKTTVVGVF |
| SEQ ID NO: 3383 | RPSAPYKTTVVGVFG |
| SEQ ID NO: 3384 | PSAPYKTTVVGVFGV |
| SEQ ID NO: 3385 | FHEFAYEGLKIRPSAP |
| SEQ ID NO: 3386 | HEFAYEGLKIRPSAPY |
| SEQ ID NO: 3387 | EFAYEGLKIRPSAPYK |
| SEQ ID NO: 3388 | FAYEGLKIRPSAPYKT |
| SEQ ID NO: 3389 | AYEGLKIRPSAPYKTT |
| SEQ ID NO: 3390 | YEGLKIRPSAPYKTTV |
| SEQ ID NO: 3391 | EGLKIRPSAPYKTTVV |
| SEQ ID NO: 3392 | GLKIRPSAPYKTTVVG |
| SEQ ID NO: 3393 | LKIRPSAPYKTTVVGV |
| SEQ ID NO: 3394 | KIRPSAPYKTTVVGVF |
| SEQ ID NO: 3395 | IRPSAPYKTTVVGVFG |
| SEQ ID NO: 3396 | RPSAPYKTTVVGVFGV |
| SEQ ID NO: 3397 | PSAPYKTTVVGVFGVP |
| SEQ ID NO: 3398 | PFHEFAYEGLKIRPSAP |
| SEQ ID NO: 3399 | FHEFAYEGLKIRPSAPY |
| SEQ ID NO: 3400 | HEFAYEGLKIRPSAPYK |
| SEQ ID NO: 3401 | EFAYEGLKIRPSAPYKT |
| SEQ ID NO: 3402 | FAYEGLKIRPSAPYKTT |
| SEQ ID NO: 3403 | AYEGLKIRPSAPYKTTV |
| SEQ ID NO: 3404 | YEGLKIRPSAPYKTTVV |
| SEQ ID NO: 3405 | EGLKIRPSAPYKTTVVG |
| SEQ ID NO: 3406 | GLKIRPSAPYKTTVVGV |
| SEQ ID NO: 3407 | LKIRPSAPYKTTVVGVF |
| SEQ ID NO: 3408 | KIRPSAPYKTTVVGVFG |
| SEQ ID NO: 3409 | IRPSAPYKTTVVGVFGV |
| SEQ ID NO: 3410 | RPSAPYKTTVVGVFGVP |
| SEQ ID NO: 3411 | PSAPYKTTVVGVFGVPG |
| SEQ ID NO: 3412 | PPFHEFAYEGLKIRPSAP |
| SEQ ID NO: 3413 | PFHEFAYEGLKIRPSAPY |
| SEQ ID NO: 3414 | FHEFAYEGLKIRPSAPYK |
| SEQ ID NO: 3415 | HEFAYEGLKIRPSAPYKT |
| SEQ ID NO: 3416 | EFAYEGLKIRPSAPYKTT |
| SEQ ID NO: 3417 | FAYEGLKIRPSAPYKTTV |
| SEQ ID NO: 3418 | AYEGLKIRPSAPYKTTVV |
| SEQ ID NO: 3419 | YEGLKIRPSAPYKTTVVG |
| SEQ ID NO: 3420 | EGLKIRPSAPYKTTVVGV |
| SEQ ID NO: 3421 | GLKIRPSAPYKTTVVGVF |
| SEQ ID NO: 3422 | LKIRPSAPYKTTVVGVFG |
| SEQ ID NO: 3423 | KIRPSAPYKTTVVGVFGV |
| SEQ ID NO: 3424 | IRPSAPYKTTVVGVFGVP |
| SEQ ID NO: 3425 | RPSAPYKTTVVGVFGVPG |
| SEQ ID NO: 3426 | PSAPYKTTVVGVFGVPGS |
| SEQ ID NO: 3427 | NPPFHEFAYEGLKIRPSAP |
| SEQ ID NO: 3428 | PPFHEFAYEGLKIRPSAPY |
| SEQ ID NO: 3429 | PFHEFAYEGLKIRPSAPYK |
| SEQ ID NO: 3430 | FHEFAYEGLKIRPSAPYKT |
| SEQ ID NO: 3431 | HEFAYEGLKIRPSAPYKTT |
| SEQ ID NO: 3432 | EFAYEGLKIRPSAPYKTTV |
| SEQ ID NO: 3433 | FAYEGLKIRPSAPYKTTVV |
| SEQ ID NO: 3434 | AYEGLKIRPSAPYKTTVVG |
| SEQ ID NO: 3435 | YEGLKIRPSAPYKTTVVGV |
| SEQ ID NO: 3436 | EGLKIRPSAPYKTTVVGVF |
| SEQ ID NO: 3437 | GLKIRPSAPYKTTVVGVFG |
| SEQ ID NO: 3438 | LKIRPSAPYKTTVVGVFGV |
| SEQ ID NO: 3439 | KIRPSAPYKTTVVGVFGVP |
| SEQ ID NO: 3440 | IRPSAPYKTTVVGVFGVPG |
| SEQ ID NO: 3441 | RPSAPYKTTVVGVFGVPGS |
| SEQ ID NO: 3442 | PSAPYKTTVVGVFGVPGSG |
| SEQ ID NO: 3443 | TNPPFHEFAYEGLKIRPSAP |
| SEQ ID NO: 3444 | NPPFHEFAYEGLKIRPSAPY |
| SEQ ID NO: 3445 | PPFHEFAYEGLKIRPSAPYK |
| SEQ ID NO: 3446 | PFHEFAYEGLKIRPSAPYKT |
| SEQ ID NO: 3447 | FHEFAYEGLKIRPSAPYKTT |
| SEQ ID NO: 3448 | HEFAYEGLKIRPSAPYKTTV |
| SEQ ID NO: 3449 | EFAYEGLKIRPSAPYKTTVV |
| SEQ ID NO: 3450 | FAYEGLKIRPSAPYKTTVVG |
| SEQ ID NO: 3451 | AYEGLKIRPSAPYKTTVVGV |
| SEQ ID NO: 3452 | YEGLKIRPSAPYKTTVVGVF |
| SEQ ID NO: 3453 | EGLKIRPSAPYKTTVVGVFG |
| SEQ ID NO: 3454 | GLKIRPSAPYKTTVVGVFGV |
| SEQ ID NO: 3455 | LKIRPSAPYKTTVVGVFGVP |
| SEQ ID NO: 3456 | KIRPSAPYKTTVVGVFGVPG |
| SEQ ID NO: 3457 | IRPSAPYKTTVVGVFGVPGS |
| SEQ ID NO: 3458 | RPSAPYKTTVVGVFGVPGSG |
| SEQ ID NO: 3459 | PSAPYKTTVVGVFGVPGSGK |

SEQ ID NO: 3460 (Ebola Virus Matrix Protein (AAL25816)):
MRRVILPTAPPEYMEAIYPVRSNSTIARGGNSNTGFLTPESVNGDTPSNPLRPIADDTID
HASHIPGSVSSAFILEAMVNVISGPKVLMKQIPIWLPLGVADQKTYSFDSTTAAIMLASY
TITHFGKATNPLVRVNRLGPGIPDHPLRLLRIGNQAFLQEFVLPPVQLPQYFTFDLTALK
LITQPLPAATWTDDTPTGSNGALRPGISFHPKLRPILLPNKSGKKGNSADLTSPEKIQAI
MTSLQDFKIVPIDPTKNIMGIEVPETLVHKLTGKKVTSKNGQPIIPVLLPKYIGLDPVAP
GDLTMVITQDCDTCHSPASLPAVIEK
SEQ ID NO: 3461 (Hepatitis B Virus PreS1/PreS2/S Envelope
Protein (BAA85340)):
MGGWSSKPRKGMGTNLSVPNPLGFFPDHQLDPAFKANSDNPDWDLNPHKDNWPDSNKVGV
GAFGPGFTPPHGGLLGWSPQAQGILTTVPTAPPPASTNRQLGRKPTPLSPPLRDTHPQAM
QWNSTTFHQTLQDPRVRALYFPAGGSSSGTVNPVQNTASSISSILSTTGDPVPNMENIAS
GLLGPLLVLQAGFFSLTKILTIPQSLDSWWTSLNFLGGTPVCLGQNSQSQISSHSPTCCP
PICPGYRWMCLRRFIIFLCILLLCLIFLLVLLDYQGMLPVCPLIPGSSTTSTGPCKTCTT
PAQGTSMFPSCCCIKPTDGNCTCIPIPSSWAFAKYLWEWASVRFSWLSLLVPFVQWFVGL
SPTVWLSVIWMMWFWGPSLYNILSPFMPLLPIFFCLWAYI
SEQ ID NO: 3462 (Human Herpesvirus 1 RL2 Protein (NP_044601))
MEPRPGASTRRPEGRPQREPAPDVWVFPCDRDLPDSSDSEAETEVGGRGDADHHDDDSAS
EADSTDTELFETGLLGPQGVDGGAVSGGSPPREEDPGSCGGAPPREDGGSDEGDVCAVCT
DEIAPHLRCDTFPCMHRFCIPCMKTWMQLRNTCPLCNAKLVYLIVGVTPSGSFSTIPIVN
DPQTRMEAEEAVRAGTAVDFIWTGNQRFAPRYLTLGGHTVRALSPTHPEPTTDEDDDDLD
DADYVPPAPRRTPRAPPRRGAAAPPVTGGASHAAPQPAAARTAPPSAPIGPHGSSNTNTT
TNSSGGGGSRQSRAAAPRGASGPSGGVGVGVGVVEAEAGRPRGRTGPLVNRPAPLANNRD
PIVISDSPPASPHRPPAAPMPGSAPRPGPPASAAASGPARPRAAVAPCVRAPPPGPGPRA
PAPGAEPAARPADARRVPQSHSSLAQAANQEQSLCRARATVARGSGGPGVEGGHGPSRGA
APSGAAPLPSAASVEQEAAVRPRKRRGSGQENPSPQSTRPPLAPAGAKRAATHPPSDSGP
GGRGQGGPGTPLTSSAASASSSSASSSSAPTPAGAASSAAGAASSSASASSGGAVGALGG
RQEETSLGPRAASGPRGPRKCARKTRHAETSGAVPAGGLTRYLPISGVSSVVALSPYVNK
TITGDCLPILDMETGNIGAYVVLVDQTGNMATRLRAAVPGWSRRTLLPETAGNHVMPPEY
PTAPASEWNSLWMTPVGNMLFDQGTLVGALDFRSLRSRHPWSGEQGASTRDEGKQ
SEQ ID NO: 3463 (Human Herpesvirus 2 Virion Glycoprotein K
(NP_044524))
MLAVRSLQHLTTVIFITAYGLVLAWYIVFGASPLHRCIYAVRPAGAHNDTALVWMKINQT
LLFLGPPTAPPGGAWTPHARVCYANIIEGRAVSLPAIPGAMSRRVMNVHEAVNCLEALWD
TQMRLVVVGWFLYLAFVALHQRRCMFGVVSPAHSMVAPATYLLNYAGRIVSSVFLQYPYT
KITRLLCELSVQRQTLVQLFEADPVTFLYHRPAIGVIVGCELLLRFVALGLIVGTALISR
GACAITHPLFLTITTWCFVSIIALTELYFILRRGSAPKNAEPAAPRGRSKGWSGVCGRCC
SIILSGIAVRLCYIAVVAGVVLVALRYEQEIQRRLFDL
SEQ ID NO: 3464 (Human Herpesvirus 2 Strain 333 Glycoprotein
I (P06764))
MPGRSLQGLAILGLWVCATGLVVRGPTVSLVSDSLVDAGAVGPQGFVEEDLRVFGELHFV
GAQVPHTNYYDGIIELFHYPLGNHCPRVVHVVTLTACPRRPAVAFTLCRSTHHAHSPAYP
TLELGLARQPLLRVRTATRDYAGLYVLRVWVGSATNASLFVLGVALSANGTFVYNGSDYG
SCDPAQLPFSAPRLGPSSVYTPGASRPTPPRTTTSPSSPRDPTPAPGDTGTPAPASGERA
PPNSTRSASESRHRLTVAQVIQIAIPASIIAFVFLGSCICFIHRCQRRYRRPRGQIYNPG
GVSCAVNEAAMARLGAELRSHPNTPPKPRRRSSSSTTMPSLTSIAEESEPGPVVLLSVSP
RPRSGPTAPQEV
SEQ ID NO: 3465 (Human Herpesvirus 4 - Eptein Barr Virus
EBNA2 (NP_039845))
MPTFYLALHGGQTYHLIVDTDSLGNPSLSVIPSNPYQEQLSDTPLIPLTIFVGENTGVPP
PLPPPPPPPPPPPPPPPPPPPPPPPPPPSPPPPPPPPPPPQRRDAWTQEPSPLDRDPLGY
DVGHGPLASAMRMLWMANYIVRQSRGDRGLILPQGPQTAPQARLVQPHVPPLRPTAPTIL
SPLSQPRLTPPQPLMMPPRPTPPTPLPPATLTVPPRPTRPTTLPPTPLLTVLQRPTELQP
TPSPPRMHLPVLHVPDQSMHPLTHQSTPNDPDSPEPRSPTVFYNIPPMPLPPSQLPPPAA
PAQPPPGVINDQQLHHLPSGPPWWPPICDPPQPSKTQGQSRGQSRGRGRGRGRGRGKGKS
RDKQRKPGGPWRPEPNTSSPSMPELSPVLGLHQGQGAGDSPTPGPSNAAPVCRNSHTATP
NVSPIHEPESHNSPEAPILFPDDWYPPSIDPADLDESWDYIFETTESPSSDEDYVEGPSK
RPRPSIQ
SEQ ID NO: 3466 (Influenza A Virus (A/Pintail
Duck/Alberta/114/79 (H8N4) Hemagglutinin (AAG38554))
SKAGVTMEKLIVIAMLLASTNAYDRICIGYQSNNSTDTVNTLIEQNVPVTQTMELVETEK
HPAYCNTDLGAPLELRDCKIEAVIYGNPKCDIHLKDQGWSYIVERPSAPEGMCYPGSIEN
LEELRFVFSSAASYKRIRLFDYSRWNVTRSGTSKACNASTGGQSFYRSINWLTKKKPDTY
DFNEGTYVNNEDGDIIFLWGIHHPPDTKEQTTLYKNANTLTSVTTNTINRNFQPNIGPRP
LVRGQQGRMDYYWGILKRGETLKIRTNGNLIAPEFGYLLKGESHGRIIQNEDIPIGNCNT
KCQTYAGAINSSKPFQNASRHYMGECPKYVKKASLRLAVGLRNTPSVEPRGLFGAIAGFI
EGGWSGMIDGWYGFHHSNSEGTGMAADQKSTQEAIDKITNKVNNIVDKMNRE
SEQ ID NO: 3467 (Human Papilomavirus L1 Protein, My09/My11
Region (AAA67231))
AQGHNNGICWFNELFVTVVDTTRSTNITISAAATQANEYTASNFKEYLRHTEEYDLQVIL
QLCKIHLTPEIMAYLHSMNEHLLDEWNFGVLPPPSTSLDDTYRYLQSRAITCQKGPSAPA
PKKDPYDGLVFWEVDLKDKLSTDLDQFPLGR
SEQ ID NO: 3468 (Human Papilomavirus Type 23 Minor Capsid
Protein L2 (NP_043365)
MVRAQRTKRASVTDIYKGCKASGTCPPDVLNKVEQNTLADKILKYGSVGVFFGGLGIGTG
KGTGGATGYVPLRPGVRVGGTPTVVRPAVIPEIIGPTELIPVDSIAPIDPEAPSIVSLTD
SGAAADLFPSEAETIAEVHPTPVDIGIDTPIVAGGRDAILEVVDTNPPTRFSVTRTQYDN
PSFQIISESTPITGEASLADHVFVFEGSGGQHVGAVTEEIELDTYPSRYSFEIEEATPPR
RTSTPIERISQEFRNLRRALYNRRLTEQVQVKNPLFLTTPSKLVRFQFDNPVFDEEVTQI
FERDVAEVEEPPDRDFLDIDRLGRPLLTESTEGRIRLSRLGQRASIQTRSGTRVGSRVHF
YTDLSTINTEEPIELELLGEHSGDASVIEEPLQSTVIDMNLDDVEAIQDTIDTADDYNSA
DLLLDNAIEEFNNSQLVFGTSDRSSSAYSIPRFESPRETIVYVQDIEGNQVIYPGPTERP
TIIFPLPSAPAVVIHTLDKSFDYYLHPSLRKKRRKRKYL
SEQ ID NO: 3469 (Human Papilomavirus Type 35 Major Capsid
Protein L1 (P27232))
MSLWRSNEATVYLPPVSVSKVVSTDEYVTRTNIYYHAGSSRLLAVGHPYYAIKKQDSNKI
AVPKVSGLQYRVFRVKLPDPNKFGFPDTSFYDPASQRLVWACTGVEVGRGQPLGVGISGH
PLLNKLDDTENSNKYVGNSGTDNRECISMDYKQTQLCLIGCRPPIGEHWGKGTPCNANQV
KAGECPPLELLNTVLQDGDMVDTGFGAMDFTTLQANKSDVPLDICSSICKYPDYLKMVSE
PYGDMLFFYLRREQMFVRHLFNRAGTVGETVPADLYIKGTTGTLPSTSYFPTPSGSMVTS
DAQIFNKPYWLQRAQGHNNGICWSNQLFVTVVDTTRSTNMSVCSAVSSSDSTYKNDNFKE
YLRHGEEYDLQFIFQLCKITLTADVMTYIHSMNPSILEDWNFGLTPPPSGTLEDTYRYVT
SQAVTCQKPSAPKPKDDPLKNYTFWEVDLKEKFSADLDQFPLGRKFLLQAGLKARPNFRL
GKRAAPASTSKKSSTKRRKVKS
SEQ ID NO: 3470 (Human Papilomavirus Type 6b Minor Capsid
Protein L2 (NP_040303))
MAHSRARRRKRASATQLYQTCKLTGTCPPDVIPKVEHNTIADQILKWGSLGVFFGGLGIG
TGSGTGGRTGYVPLQTSAKPSITSGPMARPPVVVEPVAPSDPSIVSLIEESAIINAGAPE
IVPPAHGGFTITSSETTTPAILDVSVTSHTTTSIFRNPVFTEPSVTQPQPPVEANGHILI
SAPTVTSHPIEEIPLDTFVVSSSDSGPTSSTPVPGTAPRPRVGLYSRALHQVQVTDPAFL
STPQRLITYDNPVYEGEDVSVQFSHDSIHNAPDEAFMDIIRLHRPAIASRRGLVRYSRIG
QRGSMHTRSGKHIGARIHYFYDISPIAQAAEEIEMHPLVAAQDDTFDIYAESFEPGINPT
QHPVTNISDTYLTSTPNTVTQPWGNTTVPLSLPNDLFLQSGPDITFPTAPMGTPFSPVTP
ALPTGPVFITGSGFYLHPAWYFARKRRKRIPLFFSDVAA
SEQ ID NO: 3471 (Human Papilomavirus Type 9 Late Protein
(NP_041865))
MVRAKRTKRASVTDIYRGCKAAGTCPPDVINKVEHTTIADKILQYGSAGVFFGGLGISTG
RGTGGATGYVPLGEGPGVRVGGTPTIVRPGVIPEIIGPTDLIPLDTVRPIDPTAPSIVTG
TDSTVDLLPGEIESIAEIHPVPVDNAVVDTPVVTEGRRGSSAILEVADPSPPMRTRVART
QYHNPAFQIISESTPMSGESSLADHIIVFEGSGGQLVGGPRESYTASSENIELQEFPSRY
SFEIDEGTPPRTSTPVQRAVQSLSSLRRALYNRRLTEQVAVTDPLFLSRPSRLVQFQFDN
PAFEDEVTQIFERDLSTVEEPPDRQFLDVQRLSRPLYTETPQGYVRVSRLGRRATIRTRS
GAQVGAQVHFYRDLSTINTEEPIEMQLLGEHSGDSTIVQGPVESSIVDVNIDEPDGLEVG
RQETPSVEDVDFNSEDLLLDEGVEDFSGSQLVVGTRRSTNTLTVPRFETPRDTSFYIQDI
QGYTVSYPESRQTTDIIFPHPDTPTVVIHINDTSGDYYLHPSLQRKKRKRKYL
SEQ ID NO: 3472 (Human T-cell Lymphotropic Virus Type 2 Gag
Protein (CAA61543))
MGQIHGLSPTPIPKAPRGLSTHHWLNFLQAAYRLQPGPSDFDFQQLRRFLKLALKTPIWL
NPIDYSLLASLVPKGYPGRVVEIINILVKNQVSPSAPAAPVPTPICPTTTPPPPPPPSPE
AHVPPPYVEPTSTKCFPILHPPGAPSAHRPWQMKDLQAIKQEVSSSAPGSPQFMQTLRLA
VQQFDPTAKDLQDLLQYLCSSLVVSLHHQQLNTLITEAETRGVTGYNPMAGPLRMQANNP
AQQGLRREYQNLWLAAFSTLPGNTRDPSWAAILQGLEEPYCAFVERLNVALDNGLPEGTP
KEPILRSLAYSNANKECQKILQARGPTNSPLGEMLRACQAWTPKDKTKVLVVQPRRPPPT
QPCFRCGKIGHWSRDCTQPRPPPGPCPLCQDPSHWKRDCPQPKPPQEEGEPLLLDLSSTS
GTTEEKNSLRGEI
SEQ ID NO: 3473 (West Nile Virus Polyprotein(NP_041724))
MSKKPGGPGKNRAVNMLKRGMPRGLSLIGLKRAMLSLIDGKGPIRFVLALLAFFRFTAIA
PTRAVLDRWRGVNKQTAMKHLLSFKKELGTLTSAINRRSTKQKKRGGTAGFTILLGLIAC
AGAVTLSNFQGKVMMTVNATDVTDVITIPTAAGKNLCIVRAMDVGYLCEDTITYECPVLA
AGNDPEDIDCWCTKSSVYVRYGRCTKTRHSRRSRRSLTVQTHGESTLANKKGAWLDSTKA
TRYLVKTESWILRNPGYALVAAVIGWMLGSNTMQRVVFAILLLLVAPAYSFNCLGMSNRD
FLEGVSGATWVDLVLEGDSCVTIMSKDKPTIDVKMMNMEAANLADVRSYCYLASVSDLST
RAACPTMGEAHNEKRADPAFVCKQGVVDRGWGNGCGLFGKGSIDTCAKFACTTKATGWII
QKENIKYEVAIFVHGPTTVESHGKIGATQAGRFSITPSAPSYTLKLGEYGEVTVDCEPRS
GIDTSAYYVMSVGEKSFLVHREWFMDLNLPWSSAGSTTWRNRETLMEFEEPHATKQSVVA
LGSQEGALHQALAGAIPVEFSSNTVKLTSGHLKCRVKMEKLQLKGTTYGVCSKAFKFART
PADTGHGTVVLELQYTGTDGPCKVPISSVASLNDLTPVGRLVTVNPFVSVATANSKVLIE
LEPPFGDSYIVVGRGEQQINHHWHKSGSSIGKAFTTTLRGAQRLAALGDTAWDFGSVGGV
FTSVGKAIHQVFGGAFRSLFGGMSWITQGLLGALLLWMGINARDRSIAMTFLAVGGVLLF
LSVNVHADTGCAIDIGRQELRCGSGVFIHNDVEAWMDRYKFYPETPQGLAKIIQKAHAEG
VCGLRSVSRLEHQMWEAIKDELNTLLKENGVDLSVVVEKQNGMYKAAPKRLAATTEKLEM
GWKAWGKSIIFAPELANNTFVIDGPETEECPTANRAWNSMEVEDFGFGLTSTRMFLRIRE
TNTTECDSKIIGTAVKNNMAVHSDLSYWIESGLNDTWKLERAVLGEVKSCTWPETHTLWG
DGVLESDLIIPITLAGPRSNHNRRPGYKTQNQGPWDEGRVEIDFDYCPGTTVTISDSCEH
RGPAARTTTESGKLITDWCCRSCTLPPLRFQTENGCWYGMEIRPTRHDEKTLVQSRVNAY
NADMIDPFQLGLMVVFLATQEVLRKRWTAKISIPAIMLALLVLVFGGITYTDVLRYVILV
GAAFAEANSGGDVVHLALMATFKIQPVFLVASFLKARWTNQESILLMLAAAFFQMAYYDA
KNVLSWEVPDVLNSLSVAWMILRAISFTNTSNVVVPLLALLTPGLKCLNLDVYRILLLMV
GVGSLIKEKRSSAAKKKGACLICLALASTGVFNPMILAAGLMACDPNRKRGWPATEVMTA
VGLMFAIVGGLAELDIDSMAIPMTIAGLMFAAFVISGKSTDMWIERTADITWESDAEITG
SSERVDVRLDDDGNFQLMNDPGAPWKIWMLRMACLAISAYTPWAILPSVIGFWITLQYTK
RGGVLWDTPSPKEYKKGDTTTGVYRIMTRGLLGSYQAGAGVMVEGVFHTLWHTTKGAALM
SGEGRLDPYWGSVKEDRLCYGGPWKLQHKWNGHDEVQMIVVEPGKNVKNVQTKPGVFKTP
EGEIGAVTLDYPTGTSGSPIVDKNGDVIGLYGNGVIMPNGSYISAIVQGERMEEPAPAGF
EPEMLRKKQITVLDLHPGAGKTRKILPQIIKEAINKRLRTAVLAPTRVVAAEMSEALRGL
PIRYQTSAVHREHSGNEIVDVMCHATLTHRLMSPHRVPNYNLFIMDEAHFTDPASIAARG
YIATKVELGEAAAIFMTATPPGTSDPFPESNAPISDMQTEIPDRAWNTGYEWITEYVGKT
VWFVPSVKMGNEIALCLQRAGKKVIQLNRKSYETEYPKCKNDDWDFVITTDISEMGANFK
ASRVIDSRKSVKPTIIEEGDGRVILGEPSAITAASAAQRRGRIGRNPSQVGDEYCYGGHT
NEDDSNFAHWTEARIMLDNINMPNGLVAQLYQPEREKVYTMDGEYRLRGEERKNFLEFLR
TADLPVWLAYKVAAAGISYHDRKWCFDGPRTNTILEDNNEVEVITKLGERKILRPRWADA
RVYSDHQALKSFKDFASGKRSQIGLVEVLGRMPEHFMVKTWEALDTMYVVATAEKGGRAH
RMALEELPDALQTIVLIALLSVMSLGVFFLLMQRKGIGKIGLGGVILGAATFFCWMAEVP
GTKIAGMLLLSLLLMIVLIPEPEKQRSQTDNQLAVFLICVLTLVGAVAANEMGWLDKTKN
DIGSLLGHRPEARETTLGVESFLLDLRPATAWSLYAVTTAVLTPLLKHLITSDYINTSLT
SINVQASALFTLARGFPFVDVGVSALLLAVGCWGQVTLTVTVTAAALLFCHYAYMVPGWQ
AEAMRSAQRRTAAGIMKNVVVDGIVATDVPELERTTPVMQKKVGQIILILVSMAAVVVNP
SVRTVREAGILTTAAAVTLWENGASSVWNATTAIGLCHIMRGGWLSCLSIMWTLIKNMEK
PGLKRGGAKGRTLGEVWKERLNHMTKEEFTRYRKEAITEVDRSAAKHARREGNITGGHPV
SRGTAKLRWLVERRFLEPVGKVVDLGCGRGGWCYYMATQKRVQEVKGYTKGGPGHEEPQL
VQSYGWNIVTMKSGVDVFYRPSEASDTLLCDIGESSSSAEVEEHRTVRVLEMVEDWLHRG
PKEFCIKVLCPYMPKVIEKMETLQRRYGGGLIRNPLSRNSTHEMYWVSHASGNIVHSVNM
TSQVLLGRMEKKTWKGPQFEEDVNLGSGTRAVGKPLLNSDTSKIKNRIERLKKEYSSTWH
QDANHPYRTWNYHGSYEVKPTGSASSLVNGVVRLLSKPWDTITNVTTMAMTDTTPFGQQR
VFKEKVDTKAPEPPEGVKYVLNETTNWLWAFLARDKKPRMCSREEFIGKVNSNAALGAMF
EEQNQWKNAREAVEDPKFWEMVDEEREAHLRGECNTCIYNMMGKREKKPGEFGKAKGSRA
IWFMWLGARFLEFEALGFLNEDHWLGRKNSGGGVEGLGLQKLGYILKEVGTKPGGKVYAD
DTAGWDTRITKADLENEAKVLELLDGEHRRLARSIIELTYRHKVVKVMRPAADGKTVMDV
ISREDQRGSGQVVTYALNTFTNLAVQLVRMMEGEGVIGPDDVEKLGKGKGPKVRTWLFEN
GEERLSRMAVSGDDCVVKPLDDRFATSLHFLNAMSKVRKDIQEWKPSTGWYDWQQVPFCS
NHFTELIMKDGRTLVVPCRGQDELIGRARISPGAGWNVRDTACLAKSYAQMWLLLYFHRR
DLRLMANAICSAVPANWVPTGRTTWSIHAKGEWMTTEDMLAVWNRVWIEENEWMEDKTPV
ERWSDVPYSGKREDIWCGSLIGTRTRATWAENIHVAINQVRSVIGEEKYVDYMSSLRRYE
DTIVVEDTVL
SEQ ID NO: 3474 (Measles Matrix Protein (CAA34587))
MHTPPPGAAEDSDPPGPPIGRAPGSPPPGAGRPTAKPEELPKEATEPDTVARRTAGPNEK
PVLHNNTPPTLPTPRRKAPTTGSVPNANQVCNAANLTPLDTPQRLRAVYMSITRLSDNGY
YTVPRRMLEFRSVNAVALNLLATLRTDKAIGPGKTTDNAEQPPEATFLVHIGNPRRKKSE
VHSADHCKMKIEKMGPVSAPGGIGGTSLHIRSTGKTSKTLHAQLGLKKTPCYPPMDINED
LNRSLWRSRRKTARIQAAPQPSAPQEPRTHDDAITNDDQGPFKALQTAVTSNARKRPPSQ
RQPEGPDKKAPSEELHGPSERSASS
SEQ ID NO: 3475 (Rubella Non-structural Protein (BAB32473))
MEKLLDEVLAPGGPYNLTVGSWVRDHVRSIVEGAWEVRDVVTAAQKRAIVAVIPRPVFTQ
MQVSDHPALHAISRYTRRHWIEWGPKEALHVLIDPSPGLLREVARVERRWVALCLHRTAR
KLATALAETASEAWHADYVCALRGAPSGPFYVHPEDVPHGGRAVADRCLLYYTPMQMCEL
MRTIDATLLVAVDLWPVALAAHVGDDWDDLGIAWHLDHDGGCPADCRGAGAGPTPGYTRP
CTTRIYQVLPDTAHPGRLYRCGPRLWTRDCAVAELSWEVAQHCGHQARVRAVRCTLPIRH
VRSLQPSARVRLPDLVHLAAVGRWRWFSLPRPVFQRMLSYCKTLSPDAYYSERVFKFKNA
LSHSITLAGNVLQEGWKGTCAEEDALCAYVAFRAWQSNARLAGIMKSAKRCAADSLSVAG
WLDTIWDAIKRFFGSVPLAERMEEWEQDAAVAAFDRGPLEDGGRHLDTVQPPKSPPRPEI
AATWIVHAASADRHCACAPRCDAPRERPSAPAGPPDDEALIPPWLFAERRALRCREWDFE
ALRARADTAAAPAPLAPRPARCPTVLYRHPAHHGPWLTLDEPGEADAALVLCDPLGQPLR
GPERHFAAGAHMCAQARGLQAFVRVVPPPERPWADGGARAWAKFFRGCAWAQRLLGEPAV
MHLPYTDGDVPQLIALALRTLAQQGAALALSVRDLPGGAAFDAHAVTAAVRAGPGQSAAT
SPPPGDPPPPRRARRSQRHLDARGTPPPAPARDPPPPAPSPPAPPRAGDPVLPTSAGPAD
RARHAELEVAYEPSDPPTPTKADPDSDIVESYARAAGPVHLRVRDIMDPPPGCKVVVNAA
NEGLLAGSGVCGAIFANATAALAADCRRLAPCPTGEAVATPGHGCGYTHIIHAVAPRRPR
DPAALEEGEALLERAYRSIVALAAARRWACVACPLLGAGVYGWSAAESLRAALAATRAEP
AERVSLHICHPDRATLTHASVLVGAGLAARRVSPPPTEPLASCPAGDPGRPAQRSASPPA
TPLGDATAPEPRGCQGCELCRYTRVTNDRAYVNLWLERDRGATSWAMRIPEVVVYGPEHL
ATHFPLNHYSVLKPAEVRPPRGMCGSDMWRCRGWQGMPQVRCTPSNAHAALCRTGVPPRV
STRGGELDPNTCWFRAAANVAQAARACGAYTSAGCPKCAYGRALSEARTHEDFAALSQRW
SASHADASPDGTGDPLDPLMETVGCACSRVWVGSEHEAPPDHLLVSLHRAPNGPWGVVLE
VRARPEGGNPTGHFVCAVGGGPRRVSDRPHLWLAVPLSRGGGTCAATDEGLAQAYYDDLE
VRRLGDDAMARAALASVQRPRKGPYNIRVWNMAAGAGKTTRILAAFTREDLYVCPTNALL
HEIQAKLRARDIDIKNAATYERALTKPLAAYRRIYIDEAFTLGGEYCAFVASQTTAEVIC
VGDRDQCGPHYANNCRTPVPDRWPTERSRHTWRFPDCWAARLRAGLDYDIEGERTGTFAC
NLWDGRQVDLHLAFSRETVRRLHEAGIRAYTVREAQGMSVGTACIHVGRDGTDVALALVR
DLAIVSLTRASDALYLHELEDGSLRAAGLSAFLDAGALAELKEVPAGIDRVVAVEQAPPP
LPPADGIPEAQDVPPFCPRTLEELVFGRAGHPHYADLNRVTEGEREVRYMRISRHLLNKN
HTEMPGTERVLSAVCAVRRYRAGEDGSTLRTAVARQHPRPFRQIPPPRVTAGVAQEWRMT
YLRERIDLTDVYTQMGVAARELTDRYARRYPEIFAGMCTAQSLSVPAFLKATLKCVDAAL
GPRDTEDCHAAQGKAGLEIRAWAKEWVQVMSPHFRAIQKIIMRALRPQFLVAAGHTEPEV
DAWWQAHYTTNAIEVDFTEFDMNQTLATRDVELEISAALLGLPCAEDYRALRAGSYCTLR
ELGSTETGCERTSGEPATLLHNTTVAMCMAMRMVPKGVRWAGIFQGDDMVIFLPEGARSA
ALKWTPAEVGLFGFHIPVKHVSTPTPSFCGHVGTAAGLFHDVMHQAIKVLCRRFDPDVLE
EQQVALLDRLRGVYAALPDTVAANAAYYDYSAERVLAIVRELTAYARGRGLDHPATIGAL
EEIQTPYARANLHDAD
SEQ ID NO: 3476 (Colorado Tick Fever Virus VP12 (AAB02025))
GAFVLALLISLQSVYFKLYEFYKNNETARNTSVAGFLKRHEVAVNVIVEFSFDILFFLCG
LLGFELSPTARRLIFRRTASAEKADTVELEHVSSRRRNDSRDDSTVRNVSKTSPLASQRS
RDHFDGDPREPAPPAYSPADFYPPPASPHICETPLSTRVAPSAPSASLFTAGGIGLP
SEQ ID NO: 3478 (Human Foamy Virus Gag Protein (NP_044279))
MASGSNVEEYELDVEALVVILRDRNIPRNPLHGEVIGLRLTEGWWGQIERFQMVRLILQD
DDNEPLQRPRYEVIQRAVNPHTMFMISGPLAELQLAFQDLDLPEGPLRFGPLANGHYVQG
DPYSSSYRPVTMAETAQMTRDELEDVLNTQSEIEIQMINLLELYEVETRALRRQLAERSS
TGQGGISPGAPRSRPPVSSFSGLPSLPSIPGIHPRAPSPPRATSTPGNIPWSLGDDSPPS
SSFPGPSQPRVSFHPGNPFVEEEGHRPRSQSRERRREILPAPVPSAPPMIQYIPVPPPPP
IGTVIPIQHIRSVTGEPPRNPREIPIWLGRNAPAIDGVFPVTTPDLRCRIINAILGGNIG
LSLTPGDCLTWDSAVATLFIRTHGTFPMHQLGNVIKGIVDQEGVATAYTLGMMLSGQNYQ
LVSGIIRGYLPGQAVVTALQQRLDQEIDDQTRAETFIQHLNAVYEILGLNARGQSIRASV
TPQPRPSRGRGRGQNTSRPSQGPANSGRGRQRPASGQSNRGSSTQNQNQDNLNQGGYNLR
PRTYQPQRYGGGRGRRWNDNTNNQESRPSDQGSQTPRPNQAGSGVRGNQSQTPRPAAGRG
GRGNHNRNQRSSGAGDSRAVNTVTQSATSSTDESSSAVTAASGGDQRD
SEQ ID NO: 3479 (Hepatitis E Virus ORF3 (AAC35758))
MNNMSFAAPMGSRPCALGLFCCCSSCFCLCCPRHRPVSRLAAVVGGAAAVPAVVSGVTGL
ILSPSQSPIFIQPTPSPPMSPLRPGLDLVFANLPDHSAPLGVTRPSAPPLPHVVDLPQLG
PRR
SEQ ID NO: 3480 (Hepatitis G Virus Polyprotein Precursor
(AAB65834))
MAVLLLLLVVEAGAILAPATHVCRASGQYFLTNCCALENIGFCLEGGCLVPLGCTVCTDR
CWPLYQAGLAVRPGKSAAQLVGELGSLYGPLSVSAYVAGILGLGEVYSGVLTVGVALTRR
AYPVPNLTCSVECELKWESEFWRWTEQLASNYWILEYLWKVPFDFWRGVMSLTPLLVCVA
ALLLLEQRIVMVFLLVTMAGMSQGAPASVLGSRPFEAGLTWQSCSCEANGSRVPTGERVW
DRGNVTLLCDCPNGPWVWLPAVCQAIGWGDPITHWSHGQNQWPLSCPQFVYGAVSVTCVW
GSVSWFASTGGRDSKIDVWSLVPVGSASCTIAALGSSDRDTVVELSEWGIPCATCILDRR
PASCGTCVRDCWPETGSVRFPFHRCGAGPRLTKDLEAVPFVNRTTPFTIRGPLGNQGKGN
PVRSPLGFGSYTMTKIRDSLHLVKCPTPAIEPPTGTFGFFPGTPPLNNCMLLGTEVSEVL
GGAGLTGGFYEPLVRRCSELAGRRNPVCPGFAWLSSGRPDGFIHVQGHLQEVGAGNFIPP
PRWLLLDFVFVLLYLVKLAEARLVPLILLLLWWWVNQLAVLGLPTAHAAVAGEVFAGPAL
SWCLGLPFVSMILGLANLVLYFRWMGPQRLMFLVLWKLARGAFPLALLMGIPATRGRTSV
LGAEFCFDVTFEVDTSVLGWVVASVVAWAIALLSSMSAGGWRHKAVIYRTWCKGYQALRQ
RVVRSPLGEGRPTKPLTFAWCLASYIWPDAVMLVVVGLVLLFGLFDALDWALEELLVSRP
SLRRLARVVECCVMAGEKATTIRLVSKMCARGAYLFDHMGSLSRAVKERLPEWDAALEPL
SFTRTDCRIIRDAARTLSCGQCVMGLPVVARRGDEVLIGVFQDVNHLPPGFVPTAPVVIR
RCGKGFLGVTKAALTGRDPDLHPGNVMVLGTATSRSMGTCLNGLLFTTFHGASSRTIATP
VGALNPRWWSASDDVTVYPLPDGANSLTPCTCQAESCWVIRSDGALCHGLSKGDKVELDV
AMEVSDFRGSSGSPVLCDEGHAVGMLVSVLHSGGRVTAARFIRPWTQVPTDAKTTTEPPP
VPAKGVFKEAPLFMPTGAGKSTRVPLEYGNMGHKVLILNPSVATVRAMGPYMERLAGRHP
SIYCGHDTTAFTRITDSPLTYSTYGRFLANPRQMLRGVSVVICDECHSHDSTVLLGIGRV
RELARGCGVQLVLYATATPPGSPMVQHPSIIETKLDVGEIPFYGHGISLERMRTGRHLVF
CHSKAECERLAGQFSSRGVNAIAYYRGKDSSIIKDGDLVVCATDALSTGYTGNFDSVTDC
GLVVEEVVEVTLDPTITISLRTVPASAELSMQRRSRTGRGRSGRYYYAGVGKAPAGVVRS
GPVWSAVEAGMTWYGMEPDLTANLLRLYDDCPYTAAIAADIGEAAVFFAGLAPLRMHPDV
SWAKVRGVNWPLLVGVQRTMCRETLSPGPSDDPQWAGLKGPNPVPLLLRWGNDLPSKVAG
HHIVDDLVRRLGVAEGYVRCDAGPILMVGLAIAGGMIYASYTGSLVVVTDWDVKGGGNPL
YRNGDQATPQPVVQVPPVDHRPGGESAPSDAKTVTDAVAAIQVNCDWSVMTLSIGEVLAL
AQAKTAEAYTATAKWLAGCYTGTRAVPTVSIVDKLFAGGWAAVVGHCHSVIAAAVAAYGA
SRSPPLAAAASYLMGLGDGGNAQARLASALLLGAAGTALGTPVVGLTMAGAFMGGASVSP
SLVTVLLGAVGGWEGVVNAASLVFDFMAGKLSTDDLWYAIPVLTSPGAGLAGIALGLVLY
SANNSGTTTWLNRLLTTLPRSSCIPDSYFQQADYCDKVSAMLRRLSLTRTVVALVNREPR
VDEVQVGYVWDLWEWIMRQVRMVIARVRALCPVVSLPLWHCGEGWSGEWLLDGHVESRCL
CGCVITGDVFNGQLKDPVYSTKLCRHYWMGTVPVNMLGYGETSLLLASDTPKVVPFGTSG
WAEVVVTPTHVVIRRTSCYKLLRQQILSAAVAEPYYVDGIPVSWEADARAPAMVYGPGQS
ATIDGERYTLPHQLRMRNVAPSEVPSEVSIEIGTETEDSELTEADLPPAAAALQAIENAA
RILEPHIDVIMEDCSTPSLCGSSREMPVWGEDVPRTPSPALISVTESSSDEKTPSASSSQ
EDTPSSDSFEVIQESDTAESEDSVFNVALSVPKALFPQSDATRKLTVRMSCCVEKSVTRF
FSLGLTVADVASLCEMEIQNHTAYCDKVRTPLELQVGCLVGNELTFECDKCEARQETLAS
FSYIWSGVPLTRATPAKPPVVRPVGSLLVADTTKVYVTNPHNVGRRVDNVTFWRAPRVHD
KFLVDSIERARRAAQACLSMGYTYEEAIRTVRPHAAMGWGSKVSVKDLATPAGKMSVHDR
FQEIAEGTPVPFTLTVKKEVFFKDRKEEKAPRFIVFPPLNFRIAAKLILGDPARVPKAVL
GGAYAFQYTPNQRVKEMLKLWESKKTPCAICVDATCFDSSITEEDVALETELYALASDHP
EWVRALGKYYASGTMVTPEGVPVGERYCRSSGVLTTSASNCLTCYIKVKAACDRVGLKNV
SFLIAGDDCLIICERPMCDPSEALGRALASYGYACEPSYHASLDAAPFCSTWLAECNADG
KRHFFLTTDFRRPLARMSSEYSDPMASAIGYILLYPWHPITRWVIIPHVLTCAFRGGGTP
SDPVWCQVHGNYYKFPLDKLPNIIVALHGPAALRVTADTTKTKMEAGKVLSDLKLPGLAV
HRKKAGALRTRMLRSHDWAELARGLLWHPGLRLPPPEIAGIPGGFPLSPPYMGVVHQLDF
TAQRSRWWWLGFLTLLIVALFG
SEQ ID NO: 3481 (Human Herpesvirus 5 UL32 (AAG31644))
MSLQFIGLQRRDVVALVNFLRHLTQKPDVDLEAHPKILKKCGEKRLHRRTVLFNELMLWL
GYYRELRFHNPDLSSVLEEFEVRCAAVARRGYTYPFGDRGKARDHLAVLDRTEFDTDVRH
DAEIVERALVSAVILAKMSVRETLVTAIGQTEPIAFVHLKDTEVQRIEENLEGVRRNMFC
VKPLDLNLDRHANTALVNAVNKLVYTGRLIMNVRRSWEELERKCLARIQERCKLLVKELR
MCLSFDSNYCRNILKHAVENGDSADTLLELLIEDFDIYVDSFPQSAHTFLGARPPSLEFD
DDANLLSLGGGSAFSSVPKKHVPTQPLDGWSWIASPWKGHKPFRFEAHGSLAPAADAHAA
RSAAVGYYDEEEKRRERQKRVDDEVVQREKQQLKAWEERQQNLQQRQQQPPPPTRKPGAS
RRLFGSSADEDDDDDDDEKNIFTPIKKPGTSGKGAASGNGVSSIFSGMLSSGSQKPTSGP
LNIPQQQQRHAAFSLVSPQVTKASPGRVRRDSAWDVRPLTETRGDLFSGDEDSDSSDGYP
PNRQDPRFTDTPVDITDTETSAKPPVTTAYKFEQPTLTFGAGVNVPAGAGAAILTPTPVN
PSTAPAPAPTPTFAGTQTPVNGNSPWAPTAPLPGDMNPANWPRERAWALKNPHLAYNPFR
MPTTSTTSQNNVSTTPRRPSTPRAAVTQTASQNAADEVWALRDQTAESPVEDSEEEDDDS
SDTGSVVSLGHTTPSSDYNDVISPPSQTPEQSTPSRIRKAKLSSPMTTTSTSQKPVLGKR
VATPHASARAQTVTSTPVQGRVEKQVSGTPSTVPATLLQPQPASSKTTSSRNVTSGARTS
SASARQPSASASVLSPTEDDVVSPVTSPLSMLSSASPSPAKSAPPSPVKGRGSRVGVPSL
KPTLGGKAVVGRPPSVPVSGSAPGRLSGTSRAASTTPTYPAVTTVYPPSSTAKSSVSNAP
PVASPSILKPGASAALQSRRSTGTAAVGSPVKSTTGMKTVAFDLSSPQKSGTGPQPGSAG
MGGAKTPSDAVQNILQKIEKIKNTEE
SEQ ID NO: 3482 (Human Parechovirus 2 Polyprotein
(NP_041865))
METIKSIADMATGVTKTIDATINSVNEIITNTDNASGGDILTKVADDASNILGPNCYATT
SEPENKDVVQATTTVNTTNLTQHPSAPTLPFTPDFSNVDTFHSMAYDTTTGSKNPNKLVR
LTTHAWASTLQRGHQIDHVNLPVDFWDEQRKPAYGHAKYFAAVRCGFHFQVQVNVNQGTA
GSALVVYEPKPVVDYDKDLEFGAFTNLPHVLMNLAETTQADLCIPYVADTNYVKTDSSDL
GQLKVYVWTPLSIPSGSSNQVDVTILGSLLQLDFQNPRVYGQNVDIYDTAPSKPIPLRKT
KYLTMSTKYKWTRNKVDIAEGPGSMNMANVLSTTAAQSVALVGERAFYDPRTAGSKSRFD
DLVKISQLFSVMADSTTPSANHGIDQKGYFKWSANSDPQAIVHRNLVHLNLFPNLKVFEN
SYSYFRGSLIIRLSVYASTFNRGRLNGFFPNSSTDETSEIDNAIYTICDIGSDNSFEITI
PYSFSTWMRKTHGKPIGLFQIEVLNRLTYNYSSPNEVYCIVQGKMGQDAKFFCPTGSLVT
FQNSWGSQMDLTDPLCIEDSVEDCKQTITPTELGLTSAQDDGPLGNDKPNYFLNFKSMNV
DIFTVSHTKVDNIFGRAWFAHVHDFTNDGLWRQGLEFPKEGHGALSLLFAYFTGELNIHV
LFLSDRGFLRVGHTYDTETNRTNFLSSSGIITVPAGEQMTLSVPSYSNKPLRTVRSSNAL
GYLLCKPLLTGTSSGRIEIFLSLRCPNFFFPLPAPKPATRKYRGDLATWSDQSPYGRQGK
KQLMKLAYLDRGFYKHYGIVVGDDVYQLDSDDIFKTALTGKAKFTKTRLTPDWVVEEECE
LDYFRIKYLESSVNSEHIFSVDNNCETIAKDIFGSHSLSQHQQIGLIGTILLTAGLMSTI
KTPVNPTTIKEFFNHAIEGDEQGLSLLVQKCTTFFSSAATELLDNDLVKFIIKILVRILC
YMVLYCHKPNILTTACLSTLLVMDVTSSSVLSPSCKALMQCLMDGDVKKLAEVVAESMSN
TDDDEIKEQICDTVKYTKQILSNQGPFKGFNEISTAFRHIDWWIQTLLKIKDMVLSVFKP
SVEKRAVEWLERNKEHVCSILDYASDIIVKSKDQTKMKTQEFYQRYNDCLSKFKPIMAMC
FRSCHNSISNTVYRLFQELARIPNRMATQNDLIRVEPIGIWIQGEPGQGKSFLTHTLSKQ
LQKTCGLQGIYTNPTASEFMDGYDNQDIHLIDDLGQTRKERDIEMLCNCISSDPDIVPMA
HLEEKGKFYTSKLVIATTNKPDFSSTVLLDSGALRRRFPYIMHIRAAKHYSKSGKLNVSQ
AMPHMSTGECWEVSKNGRDWETLKLKELIDKITVDYKERIANYNTWKKQLEDQTLDDLDD
AVSYIKHNYPDAIPYIDEYLNIEMSTLIEQMEAFIEPKPSVFKCFASRVGDKIKEASREV
VKWFSDKLKSMLNFVERNKAWLTVVSAVTSAIGILLLVTKIFKKEESKDERAYNPTLPVA
KPKGTFPVSQREFKNEAPYDGQLEHIISQMAYITGSTTGHITHCAGYQHDEIILHGHSIK
YLEQEEELTLHYKNKVFPIEQPSVTQVTLGGKPMDLAIVKCKLPFRFKKNSKYYTNKIGT
ESMLIWMTEQGIITKEVQRVHHSGGIKTREGTESTKTISYTVKSCKGMCGGLLISKVEGN
FKILGMHIAGNGEMGVAIPFNFLKNDMSDQGIVTEVTPIQPMYINTKSQIHKSPVYGAVE
VKMGPAVLSKSDTRLEEPVDCLVKKSASKYRVNKFQVNNELWQGVKACVKSKFREIFGVN
GIVDMKTAILGTSHVNSMDLSTSAGYSFVKSGYKKKDLICLEPFSVSPMLEKLVQEKFHN
LLKGNQITTIFNTCLKDELRKLDKIATGKTRCIEACEIDYCIVYRMIMMEIYDKIYQTPC
YYSGLAVGINPYRDWHFMINALNDYNYEMDYSQYDGSLSSMLLWEAVQVLAYCHDSPDLV
MQLHKPVIDSDHVVFNERWLIHGGMPSGSPCTTVLNSLCNLMMCIYTTNLISPGIDCLPI
VYGDDVILSLDKEIEPERLQSIMAESFGAEVTGSRKDEPPSLKPRMEVEFLKRKPGYFPE
STFIVGKLDTENMIQHLMWMKNFSTFKQQLQSYLMELCLHGKDTYQHYVKILNPYLKEWN
IPVDDYEVVIGKLVPMVFD
SEQ ID NO: 3483 (Semliki Forest Virus Polyprotein(CAA76683))
MAAKVHVDIEADSPFIKSLQKAFPSFEVESLQVTPNDHANARAFSHLATKLIEQETDKDT
LILDIGSAPSRRMMSTHKYHCVCPMRSAEDPERLVCYAKKLAAASGKVLDREIAGKITDL
QTVMATPDAESPTFCLHTDVTCRTAAEVAVYQDVYAVHAPTSLYHQAMKGVRTAYWIGFD
TTPFMFDALAGAYPTYATNWADEQVLQARNIGLCAASLTEGRLGKLSILRKKQLKPSDTV
MFSVGSTLYTESRKLLRSWHLPSVFHLKGKQSFTCRCDTIVSCEGYVVKKITMCPGLYGK
TVGYAVTHHAEGFLVCKTTDTVKGERVSFPVCTYVPSTICDQMTGILATDVTPEDAQKLL
VGLNQRIVVNGRTQRNTNTMKNYLLPVVAVAFSKWAREYKADLDDEKPLGVRERSLTCCC
LWAFKTKKMHTMYKKPDTQTIVKVPSEFNSFVIPSLWSTGLAIPVRSRIKMLLAKKTKRE
LIPALDASSARDAEQEEKERLEAELTREALPPLVPIAPAETGVVDVDVEELEYRAGAGVV
ETPRSALKVTAQPNDVLLGNYVVLSPQTVLKSSKLAPVHPLAEQVKIITHNGRAGRYQVD
GYDGRVLLPCGSAIPVPEFQALSESATMVYNEREFVNRKLYHIAVHGPSLNTDEENYEKV
RAERTDAEYVFDVDKKCCIKREEASGLVLVGELTNPPFHEFAYEGLKIRPSAPYKTTVVG
VFGVPGSGKSAIIKSLVTKHDLVTSGKKENCQEIVNDVKKHRGLDIQAKTVDSILLNGCR
RAVDILYVDEAFACHSGTLLALIALVKPRSKVVLCGDPKQCGFFNMMQLKVNFNHNICTE
VCHKSISRRCTRPVTAIVSTLHYGGKMRTTNPCNKPIIIDTTGQTKPKPGDIVLTCFRGW
VKQLQLDYRGHEVMTAAASQGLTRKGVYAVRQKVNENPLYAPASEHVNVLLTRTEDRLVW
KTLAGDPWIKVLSNIPQGNFTATLEEWQEEHDKIMKVIEGPAAPVDAFQNKANVCWAKSL
VPVLDTAGIRLTAEEWSTIITAFKEDRAYSPEVALNEICTKYYGVDLDSGLFSAPKVSLY
YENNHWDNRPGGRMYGFNAATAARLEARHTFLKGQWHTGKQAVIAERKIQPLSVLDNVIP
INRRLPHALVAEYKTVKGSRVEWLVNKVRGYHVLLVSEYNLALPRRRVTWLSPLNVTGAD
RCYDLSLGLPADAGRYDLVFVNIHTEFRIHHYQQCVDHAMKLQMLGGDALRLLKPGGNLL
MRAYGYADKISEAVVSSLSRKFSSARVLRPDCVTSNTEVFLLFSNFDNGKRPSTLHQMNT
KLSAVYAGEAMHTAGC
SEQ ID NO: 3484 (HIV GAG protein (AF324493))
MGARASVLSGGELDKWEKIRLRPGGKKQYKLKHIVWASRELERFAVNPGLLETSEGCRQILGQLQ
PSLQTGSEELRSLYNTIAVLYCVHQRIDVKDTKEALDKIEEEQNKSKKKAQQAAA
DTGNNSQVSQNYPIVQNLQGQMVHQAISPRTLNAWVKVVEEKAFSPEVIPMFSALSEGAT
PQDLNTMLNTVGGHQAAMQMLKETINEEAAEWDRLHPVHAGPIAPGQMREPRGSDIAGTT
STLQEQIGWMTHNPPIPVGEIYKRWIILGLNKIVRMYSPTSILDIRQGPKEPFRDYVDRF
YKTLRAEQASQEVKNWMTETLLVQNANPDCKTILKALGPGATLEEMMTACQGVGGPGHKA
RVLAEAMSQVTNPATIMIQKGNFRNQRKTVKCFNCGKEGHIAKNCRAPRKKGCWKCGKEG
HQMKDCTERQANFLGKIWPSHKGRPGNFLQSRPEPTAPPEESFRFGEETTTPSQKQEPID
KELYPLASLRSLFGSDPSSQ
SEQ ID NO: 3485
CTTCAGAGCAGACCAGAGCCAACAGCCCCACCAGAAGAGAGCTTCAGGTTTG
GGGAAGAGACAACAACTCCCTCTCAGAAGCAGGAGCCGATAGACAAGGAAC
TGTATCCTTTAGCTTCCCTCAGATCACTCTTTGGCAGCGACCCCTCGTCACAAT

The application's sequence listing, which the Patent Office published only in electronic form, follows.

SEQUENCE LISTING (3487 sequences)

SEQ ID NO: 1 - protein, 4 aa, Human immunodeficiency virus
PTAP

SEQ ID NO: 2 - protein, 4 aa, Human immunodeficiency virus
PSAP

SEQ ID NO: 3 - protein, 4 aa, Human immunodeficiency virus
PIAP

SEQ ID NO: 4 - protein, 4 aa, Human immunodeficiency virus
PTTP

SEQ ID NO: 5 - protein, 4 aa, Human immunodeficiency virus
PSTP

SEQ ID NO: 6 - protein, 4 aa, Human immunodeficiency virus
PITP

SEQ ID NO: 7 - protein, 5 aa, Human immunodeficiency virus
EPTAP

SEQ ID NO: 8 - protein, 5 aa, Human immunodeficiency virus
EPSAP

SEQ ID NO: 9 - protein, 5 aa, Human immunodeficiency virus
PTAPP

SEQ ID NO: 10 - protein, 5 aa, Human immunodeficiency virus
PSAPP

SEQ ID NO: 11 - protein, 6 aa, Human immunodeficiency virus
EPTAPP

SEQ ID NO: 12 - protein, 6 aa, Human immunodeficiency virus
EPSAPP

SEQ ID NO: 13 - protein, 6 aa, Human immunodeficiency virus
PEPTAP

SEQ ID NO: 14 - protein, 6 aa, Human immunodeficiency virus
PEPSAP

SEQ ID NO: 15 - protein, 7 aa, Human immunodeficiency virus
RPEPTAP

SEQ ID NO: 16 - protein, 7 aa, Human immunodeficiency virus
RPEPSAP

SEQ ID NO: 17 - protein, 7 aa, Human immunodeficiency virus
PEPTAPP

SEQ ID NO: 18 - protein, 7 aa, Human immunodeficiency virus
PEPSAPP

SEQ ID NO: 19 - protein, 8 aa, Human immunodeficiency virus
EPTAPPEE

SEQ ID NO: 20 - protein, 8 aa, Human immunodeficiency virus
EPSAPPEE

SEQ ID NO: 21 - protein, 8 aa, Human immunodeficiency virus
EPTAPPAE

SEQ ID NO: 22 - protein, 9 aa, Human immunodeficiency virus
PEPTAPPEE

SEQ ID NO: 23 - protein, 9 aa, Human immunodeficiency virus
PEPTAPPAE

SEQ ID NO: 24 - protein, 9 aa, Human immunodeficiency virus
PEPSAPPEE

SEQ ID NO: 25 - protein, 9 aa, Artificial Sequence
  Modified HIV Peptide
PGPTAPPEE

SEQ ID NO: 26 - protein, 9 aa, Artificial Sequence
  Modified HIV Peptide
PGPTAPPAE

SEQ ID NO: 27 - protein, 9 aa, Artificial Sequence
  Modified HIV Peptide
PGPSAPPEE

SEQ ID NO: 28 - protein, 10 aa, Human immunodeficiency virus
RPEPTAPPEE

SEQ ID NO: 29 - protein, 10 aa, Human immunodeficiency virus
RPEPSAPPEE

SEQ ID NO: 30 - protein, 10 aa, Human immunodeficiency virus
RPEPTAPPAE

SEQ ID NO: 31 - protein, 10 aa, Human immunodeficiency virus
RPEPSAPPAE

SEQ ID NO: 32 - protein, 10 aa, Artificial Sequence
  Modified HIV Peptide
RPGPTAPPEE

SEQ ID NO: 33 - protein, 10 aa, Artificial Sequence
  Modified HIV Peptide
RPGPSAPPEE

SEQ ID NO: 34 - protein, 10 aa, Artificial Sequence
  Modified HIV Peptide
RPGPTAPPAE

SEQ ID NO: 35 - protein, 10 aa, Artificial Sequence
  Modified HIV Peptide
RPGPSAPPAE

SEQ ID NO: 36 - protein, 13 aa, Human immunodeficiency virus
LQSRPEPTAPPEE

SEQ ID NO: 37 - protein, 13 aa, Human immunodeficiency virus
LQSRPEPSAPPEE

SEQ ID NO: 38 - protein, 8 aa, Ebola virus
RVILPTAP

SEQ ID NO: 39 - protein, 8 aa, Ebola virus
VILPTAPP

SEQ ID NO: 40 - protein, 8 aa, Ebola virus
ILPTAPPE

SEQ ID NO: 41 - protein, 8 aa, Ebola virus
LPTAPPEY

SEQ ID NO: 42 - protein, 8 aa, Ebola virus
PTAPPEYM

SEQ ID NO: 43 - protein, 9 aa, Ebola virus
RRVILPTAP

SEQ ID NO: 44 - protein, 9 aa, Ebola virus
RVILPTAPP

SEQ ID NO: 45 - protein, 9 aa, Ebola virus
VILPTAPPE

SEQ ID NO: 46 - protein, 9 aa, Ebola virus
ILPTAPPEY

SEQ ID NO: 47 - protein, 9 aa, Ebola virus
LPTAPPEYM

SEQ ID NO: 48 - protein, 9 aa, Ebola virus
PTAPPEYME

SEQ ID NO: 49 - protein, 10 aa, Ebola virus
MRRVILPTAP

SEQ ID NO: 50 - protein, 10 aa, Ebola virus
RRVILPTAPP

SEQ ID NO: 51 - protein, 10 aa, Ebola virus
RVILPTAPPE

SEQ ID NO: 52 - protein, 10 aa, Ebola virus
VILPTAPPEY

SEQ ID NO: 53 - protein, 10 aa, Ebola virus
ILPTAPPEYM

SEQ ID NO: 54 - protein, 10 aa, Ebola virus
LPTAPPEYME

SEQ ID NO: 55 - protein, 10 aa, Ebola virus
PTAPPEYMEA

SEQ ID NO: 56 - protein, 11 aa, Ebola virus
MRRVILPTAPP

SEQ ID NO: 57 - protein, 11 aa, Ebola virus
RRVILPTAPPE

SEQ ID NO: 58 - protein, 11 aa, Ebola virus
RVILPTAPPEY

SEQ ID NO: 59 - protein, 11 aa, Ebola virus
VILPTAPPEYM

SEQ ID NO: 60 - protein, 11 aa, Ebola virus
ILPTAPPEYME

SEQ ID NO: 61 - protein, 11 aa, Ebola virus
LPTAPPEYMEA

SEQ ID NO: 62 - protein, 11 aa, Ebola virus
PTAPPEYMEAI

SEQ ID NO: 63 - protein, 12 aa, Ebola virus
MRRVILPTAPPE

SEQ ID NO: 64 - protein, 12 aa, Ebola virus
RRVILPTAPPEY

SEQ ID NO: 65 - protein, 12 aa, Ebola virus
RVILPTAPPEYM

SEQ ID NO: 66 - protein, 12 aa, Ebola virus
VILPTAPPEYME

SEQ ID NO: 67 - protein, 12 aa, Ebola virus
ILPTAPPEYMEA

SEQ ID NO: 68 - protein, 12 aa, Ebola virus
LPTAPPEYMEAI

SEQ ID NO: 69 - protein, 12 aa, Ebola virus
PTAPPEYMEAIY

SEQ ID NO: 70 - protein, 13 aa, Ebola virus
MRRVILPTAPPEY

SEQ ID NO: 71 - protein, 13 aa, Ebola virus
RRVILPTAPPEYM

SEQ ID NO: 72 - protein, 13 aa, Ebola virus
RVILPTAPPEYME

SEQ ID NO: 73 - protein, 13 aa, Ebola virus
VILPTAPPEYMEA

SEQ ID NO: 74 - protein, 13 aa, Ebola virus
ILPTAPPEYMEAI

SEQ ID NO: 75 - protein, 13 aa, Ebola virus
LPTAPPEYMEAIY

SEQ ID NO: 76 - protein, 13 aa, Ebola virus
PTAPPEYMEAIYP

SEQ ID NO: 77 - protein, 14 aa, Ebola virus
MRRVILPTAPPEYM

SEQ ID NO: 78 - protein, 14 aa, Ebola virus
RRVILPTAPPEYME

SEQ ID NO: 79 - protein, 14 aa, Ebola virus
RVILPTAPPEYMEA

SEQ ID NO: 80 - protein, 14 aa, Ebola virus
VILPTAPPEYMEAI

SEQ ID NO: 81 - protein, 14 aa, Ebola virus
ILPTAPPEYMEAIY

SEQ ID NO: 82 - protein, 14 aa, Ebola virus
LPTAPPEYMEAIYP

SEQ ID NO: 83 - protein, 14 aa, Ebola virus
PTAPPEYMEAIYPV

SEQ ID NO: 84 - protein, 15 aa, Ebola virus
MRRVILPTAPPEYME

SEQ ID NO: 85 - protein, 15 aa, Ebola virus
RRVILPTAPPEYMEA

SEQ ID NO: 86 - protein, 15 aa, Ebola virus
RVILPTAPPEYMEAI

SEQ ID NO: 87 - protein, 15 aa, Ebola virus
VILPTAPPEYMEAIY

SEQ ID NO: 88 - protein, 15 aa, Ebola virus
ILPTAPPEYMEAIYP

SEQ ID NO: 89 - protein, 15 aa, Ebola virus
LPTAPPEYMEAIYPV

SEQ ID NO: 90 - protein, 15 aa, Ebola virus
PTAPPEYMEAIYPVR

SEQ ID NO: 91 - protein, 16 aa, Ebola virus
MRRVILPTAPPEYMEA

SEQ ID NO: 92 - protein, 16 aa, Ebola virus
RRVILPTAPPEYMEAI

SEQ ID NO: 93 - protein, 16 aa, Ebola virus
RVILPTAPPEYMEAIY

SEQ ID NO: 94 - protein, 16 aa, Ebola virus
VILPTAPPEYMEAIYP

SEQ ID NO: 95 - protein, 16 aa, Ebola virus
ILPTAPPEYMEAIYPV

SEQ ID NO: 96 - protein, 16 aa, Ebola virus
LPTAPPEYMEAIYPVR

SEQ ID NO: 97 - protein, 16 aa, Ebola virus
PTAPPEYMEAIYPVRS

SEQ ID NO: 98 - protein, 17 aa, Ebola virus
MRRVILPTAPPEYMEAI

SEQ ID NO: 99 - protein, 17 aa, Ebola virus
RRVILPTAPPEYMEAIY

SEQ ID NO: 100 - protein, 17 aa, Ebola virus
RVILPTAPPEYMEAIYP

SEQ ID NO: 101 - protein, 17 aa, Ebola virus
VILPTAPPEYMEAIYPV

SEQ ID NO: 102 - protein, 17 aa, Ebola virus
ILPTAPPEYMEAIYPVR

SEQ ID NO: 103 - protein, 17 aa, Ebola virus
LPTAPPEYMEAIYPVRS

SEQ ID NO: 104 - protein, 17 aa, Ebola virus
PTAPPEYMEAIYPVRSN

SEQ ID NO: 105 - protein, 18 aa, Ebola virus
MRRVILPTAPPEYMEAIY

SEQ ID NO: 106 - protein, 18 aa, Ebola virus
RRVILPTAPPEYMEAIYP

SEQ ID NO: 107 - protein, 18 aa, Ebola virus
RVILPTAPPEYMEAIYPV

SEQ ID NO: 108 - protein, 18 aa, Ebola virus
VILPTAPPEYMEAIYPVR

SEQ ID NO: 109 - protein, 18 aa, Ebola virus
ILPTAPPEYMEAIYPVRS

SEQ ID NO: 110 - protein, 18 aa, Ebola virus
LPTAPPEYMEAIYPVRSN

SEQ ID NO: 111 - protein, 18 aa, Ebola virus
PTAPPEYMEAIYPVRSNS

SEQ ID NO: 112 - protein, 19 aa, Ebola virus
MRRVILPTAPPEYMEAIYP

SEQ ID NO: 113 - protein, 19 aa, Ebola virus
RRVILPTAPPEYMEAIYPV

SEQ ID NO: 114 - protein, 19 aa, Ebola virus
RVILPTAPPEYMEAIYPVR

SEQ ID NO: 115 - protein, 19 aa, Ebola virus
VILPTAPPEYMEAIYPVRS

SEQ ID NO: 116 - protein, 19 aa, Ebola virus
ILPTAPPEYMEAIYPVRSN

SEQ ID NO: 117 - protein, 19 aa, Ebola virus
LPTAPPEYMEAIYPVRSNS

SEQ ID NO: 118 - protein, 19 aa, Ebola virus
PTAPPEYMEAIYPVRSNST

SEQ ID NO: 119 - protein, 20 aa, Ebola virus
MRRVILPTAPPEYMEAIYPV

SEQ ID NO: 120 - protein, 20 aa, Ebola virus
RRVILPTAPPEYMEAIYPVR

SEQ ID NO: 121 - protein, 20 aa, Ebola virus
RVILPTAPPEYMEAIYPVRS

SEQ ID NO: 122 - protein, 20 aa, Ebola virus
VILPTAPPEYMEAIYPVRSN

SEQ ID NO: 123 - protein, 20 aa, Ebola virus
ILPTAPPEYMEAIYPVRSNS

SEQ ID NO: 124 - protein, 20 aa, Ebola virus
LPTAPPEYMEAIYPVRSNST

SEQ ID NO: 125 - protein, 20 aa, Ebola virus
PTAPPEYMEAIYPVRSNSTI

SEQ ID NO: 126 - protein, 8 aa, Hepatitis B virus
LTTVPTAP

SEQ ID NO: 127 - protein, 8 aa, Hepatitis B virus
TTVPTAPP

SEQ ID NO: 128 - protein, 8 aa, Hepatitis B virus
TVPTAPPP

SEQ ID NO: 129 - protein, 8 aa, Hepatitis B virus
VPTAPPPA

SEQ ID NO: 130 - protein, 8 aa, Hepatitis B virus
PTAPPPAS

SEQ ID NO: 131 - protein, 9 aa, Hepatitis B virus
ILTTVPTAP

SEQ ID NO: 132 - protein, 9 aa, Hepatitis B virus
LTTVPTAPP

SEQ ID NO: 133 - protein, 9 aa, Hepatitis B virus
TTVPTAPPP

SEQ ID NO: 134 - protein, 9 aa, Hepatitis B virus
TVPTAPPPA

SEQ ID NO: 135 - protein, 9 aa, Hepatitis B virus
VPTAPPPAS

SEQ ID NO: 136 - protein, 9 aa, Hepatitis B virus
PTAPPPAST

SEQ ID NO: 137 - protein, 10 aa, Hepatitis B virus
GILTTVPTAP

SEQ ID NO: 138 - protein, 10 aa, Hepatitis B virus
ILTTVPTAPP

SEQ ID NO: 139 - protein, 10 aa, Hepatitis B virus
LTTVPTAPPP

SEQ ID NO: 140 - protein, 10 aa, Hepatitis B virus
TTVPTAPPPA

SEQ ID NO: 141 - protein, 10 aa, Hepatitis B virus
TVPTAPPPAS

SEQ ID NO: 142 - protein, 10 aa, Hepatitis B virus
VPTAPPPAST

SEQ ID NO: 143 - protein, 10 aa, Hepatitis B virus
PTAPPPASTN

SEQ ID NO: 144 - protein, 11 aa, Hepatitis B virus
QGILTTVPTAP

SEQ ID NO: 145 - protein, 11 aa, Hepatitis B virus
GILTTVPTAPP

SEQ ID NO: 146 - protein, 11 aa, Hepatitis B virus
ILTTVPTAPPP

SEQ ID NO: 147 - protein, 11 aa, Hepatitis B virus
LTTVPTAPPPA

SEQ ID NO: 148 - protein, 11 aa, Hepatitis B virus
TTVPTAPPPAS

SEQ ID NO: 149 - protein, 11 aa, Hepatitis B virus
TVPTAPPPAST

SEQ ID NO: 150 - protein, 11 aa, Hepatitis B virus
VPTAPPPASTN

SEQ ID NO: 151 - protein, 11 aa, Hepatitis B virus
PTAPPPASTNR

SEQ ID NO: 152 - protein, 12 aa, Hepatitis B virus
AQGILTTVPTAP

SEQ ID NO: 153 - protein, 12 aa, Hepatitis B virus
QGILTTVPTAPP

SEQ ID NO: 154 - protein, 12 aa, Hepatitis B virus
GILTTVPTAPPP

SEQ ID NO: 155 - protein, 12 aa, Hepatitis B virus
ILTTVPTAPPPA

SEQ ID NO: 156 - protein, 12 aa, Hepatitis B virus
LTTVPTAPPPAS

SEQ ID NO: 157 - protein, 12 aa, Hepatitis B virus
TTVPTAPPPAST

SEQ ID NO: 158 - protein, 12 aa, Hepatitis B virus
TVPTAPPPASTN

SEQ ID NO: 159 - protein, 12 aa, Hepatitis B virus
VPTAPPPASTNR

SEQ ID NO: 160 - protein, 12 aa, Hepatitis B virus
PTAPPPASTNRQ

SEQ ID NO: 161 - protein, 13 aa, Hepatitis B virus
QAQGILTTVPTAP

SEQ ID NO: 162 - protein, 13 aa, Hepatitis B virus
AQGILTTVPTAPP

SEQ ID NO: 163 - protein, 13 aa, Hepatitis B virus
QGILTTVPTAPPP

SEQ ID NO: 164 - protein, 13 aa, Hepatitis B virus
GILTTVPTAPPPA

SEQ ID NO: 165 - protein, 13 aa, Hepatitis B virus
ILTTVPTAPPPAS

SEQ ID NO: 166 - protein, 13 aa, Hepatitis B virus
LTTVPTAPPPAST

SEQ ID NO: 167 - protein, 13 aa, Hepatitis B virus
TTVPTAPPPASTN

SEQ ID NO: 168 - protein, 13 aa, Hepatitis B virus
TVPTAPPPASTNR

SEQ ID NO: 169 - protein, 13 aa, Hepatitis B virus
VPTAPPPASTNRQ

SEQ ID NO: 170 - protein, 13 aa, Hepatitis B virus
PTAPPPASTNRQL

SEQ ID NO: 171 - protein, 14 aa, Hepatitis B virus
PQAQGILTTVPTAP

SEQ ID NO: 172 - protein, 14 aa, Hepatitis B virus
QAQGILTTVPTAPP

SEQ ID NO: 173 - protein, 14 aa, Hepatitis B virus
AQGILTTVPTAPPP

SEQ ID NO: 174 - protein, 14 aa, Hepatitis B virus
QGILTTVPTAPPPA

SEQ ID NO: 175 - protein, 14 aa, Hepatitis B virus
GILTTVPTAPPPAS

SEQ ID NO: 176 - protein, 14 aa, Hepatitis B virus
ILTTVPTAPPPAST

SEQ ID NO: 177 - protein, 14 aa, Hepatitis B virus
LTTVPTAPPPASTN

SEQ ID NO: 178 - protein, 14 aa, Hepatitis B virus
TTVPTAPPPASTNR

SEQ ID NO: 179 - protein, 14 aa, Hepatitis B virus
TVPTAPPPASTNRQ

SEQ ID NO: 180 - protein, 14 aa, Hepatitis B virus
VPTAPPPASTNRQL

SEQ ID NO: 181 - protein, 14 aa, Hepatitis B virus
PTAPPPASTNRQLG

SEQ ID NO: 182 - protein, 15 aa, Hepatitis B virus
SPQAQGILTTVPTAP

SEQ ID NO: 183 - protein, 15 aa, Hepatitis B virus
PQAQGILTTVPTAPP

SEQ ID NO: 184 - protein, 15 aa, Hepatitis B virus
QAQGILTTVPTAPPP

SEQ ID NO: 185 - protein, 15 aa, Hepatitis B virus
AQGILTTVPTAPPPA

SEQ ID NO: 186 - protein, 15 aa, Hepatitis B virus
QGILTTVPTAPPPAS

SEQ ID NO: 187 - protein, 15 aa, Hepatitis B virus
GILTTVPTAPPPAST

SEQ ID NO: 188 - protein, 15 aa, Hepatitis B virus
ILTTVPTAPPPASTN

SEQ ID NO: 189 - protein, 15 aa, Hepatitis B virus
LTTVPTAPPPASTNR

SEQ ID NO: 190 - protein, 15 aa, Hepatitis B virus
TTVPTAPPPASTNRQ

SEQ ID NO: 191 - protein, 15 aa, Hepatitis B virus
TVPTAPPPASTNRQL

SEQ ID NO: 192 - protein, 15 aa, Hepatitis B virus
VPTAPPPASTNRQLG

SEQ ID NO: 193 - protein, 15 aa, Hepatitis B virus
PTAPPPASTNRQLGR

SEQ ID NO: 194 - protein, 16 aa, Hepatitis B virus
WSPQAQGILTTVPTAP

SEQ ID NO: 195 - protein, 16 aa, Hepatitis B virus
SPQAQGILTTVPTAPP

SEQ ID NO: 196 - protein, 16 aa, Hepatitis B virus
PQAQGILTTVPTAPPP

SEQ ID NO: 197 - protein, 16 aa, Hepatitis B virus
QAQGILTTVPTAPPPA

SEQ ID NO: 198 - protein, 16 aa, Hepatitis B virus
AQGILTTVPTAPPPAS

SEQ ID NO: 199 - protein, 16 aa, Hepatitis B virus
QGILTTVPTAPPPAST

SEQ ID NO: 200 - protein, 16 aa, Hepatitis B virus
GILTTVPTAPPPASTN

SEQ ID NO: 201 - protein, 16 aa, Hepatitis B virus
ILTTVPTAPPPASTNR

SEQ ID NO: 202 - protein, 16 aa, Hepatitis B virus
LTTVPTAPPPASTNRQ

SEQ ID NO: 203 - protein, 16 aa, Hepatitis B virus
TTVPTAPPPASTNRQL

SEQ ID NO: 204 - protein, 16 aa, Hepatitis B virus
TVPTAPPPASTNRQLG

SEQ ID NO: 205 - protein, 16 aa, Hepatitis B virus
VPTAPPPASTNRQLGR

SEQ ID NO: 206 - protein, 16 aa, Hepatitis B virus
PTAPPPASTNRQLGRK

SEQ ID NO: 207 - protein, 17 aa, Hepatitis B virus
GWSPQAQGILTTVPTAP

SEQ ID NO: 208 - protein, 17 aa, Hepatitis B virus
WSPQAQGILTTVPTAPP

SEQ ID NO: 209 - protein, 17 aa, Hepatitis B virus
SPQAQGILTTVPTAPPP

SEQ ID NO: 210 - protein, 17 aa, Hepatitis B virus
PQAQGILTTVPTAPPPA

SEQ ID NO: 211 - protein, 17 aa, Hepatitis B virus
QAQGILTTVPTAPPPAS

SEQ ID NO: 212 - protein, 17 aa, Hepatitis B virus
AQGILTTVPTAPPPAST

SEQ ID NO: 213 - protein, 17 aa, Hepatitis B virus
QGILTTVPTAPPPASTN

SEQ ID NO: 214 - protein, 17 aa, Hepatitis B virus
GILTTVPTAPPPASTNR

SEQ ID NO: 215 - protein, 17 aa, Hepatitis B virus
ILTTVPTAPPPASTNRQ

SEQ ID NO: 216 - protein, 17 aa, Hepatitis B virus
LTTVPTAPPPASTNRQL

SEQ ID NO: 217 - protein, 17 aa, Hepatitis B virus
TTVPTAPPPASTNRQLG

SEQ ID NO: 218 - protein, 17 aa, Hepatitis B virus
TVPTAPPPASTNRQLGR

SEQ ID NO: 219 - protein, 17 aa, Hepatitis B virus
VPTAPPPASTNRQLGRK

SEQ ID NO: 220 - protein, 17 aa, Hepatitis B virus
PTAPPPASTNRQLGRKP

SEQ ID NO: 221 - protein, 18 aa, Hepatitis B virus
LGWSPQAQGILTTVPTAP

SEQ ID NO: 222 - protein, 18 aa, Hepatitis B virus
GWSPQAQGILTTVPTAPP

SEQ ID NO: 223 - protein, 18 aa, Hepatitis B virus
WSPQAQGILTTVPTAPPP

SEQ ID NO: 224 - protein, 18 aa, Hepatitis B virus
SPQAQGILTTVPTAPPPA

SEQ ID NO: 225 - protein, 18 aa, Hepatitis B virus
PQAQGILTTVPTAPPPAS

SEQ ID NO: 226 - protein, 18 aa, Hepatitis B virus
QAQGILTTVPTAPPPAST

SEQ ID NO: 227 - protein, 18 aa, Hepatitis B virus
AQGILTTVPTAPPPASTN

SEQ ID NO: 228 - protein, 18 aa, Hepatitis B virus
QGILTTVPTAPPPASTNR

SEQ ID NO: 229 - protein, 18 aa, Hepatitis B virus
GILTTVPTAPPPASTNRQ

SEQ ID NO: 230 - protein, 18 aa, Hepatitis B virus
ILTTVPTAPPPASTNRQL

SEQ ID NO: 231 - protein, 18 aa, Hepatitis B virus
LTTVPTAPPPASTNRQLG

SEQ ID NO: 232 - protein, 18 aa, Hepatitis B virus
TTVPTAPPPASTNRQLGR

SEQ ID NO: 233 - protein, 18 aa, Hepatitis B virus
TVPTAPPPASTNRQLGRK

SEQ ID NO: 234 - protein, 18 aa, Hepatitis B virus
VPTAPPPASTNRQLGRKP

SEQ ID NO: 235 - protein, 18 aa, Hepatitis B virus
PTAPPPASTNRQLGRKPT

SEQ ID NO: 236 - protein, 19 aa, Hepatitis B virus
LLGWSPQAQGILTTVPTAP

SEQ ID NO: 237 - protein, 19 aa, Hepatitis B virus
LGWSPQAQGILTTVPTAPP

SEQ ID NO: 238 - protein, 19 aa, Hepatitis B virus
GWSPQAQGILTTVPTAPPP

SEQ ID NO: 239 - protein, 19 aa, Hepatitis B virus
WSPQAQGILTTVPTAPPPA

SEQ ID NO: 240 - protein, 19 aa, Hepatitis B virus
SPQAQGILTTVPTAPPPAS

SEQ ID NO: 241 - protein, 19 aa, Hepatitis B virus
PQAQGILTTVPTAPPPAST

SEQ ID NO: 242 - protein, 19 aa, Hepatitis B virus
QAQGILTTVPTAPPPASTN

SEQ ID NO: 243 - protein, 19 aa, Hepatitis B virus
AQGILTTVPTAPPPASTNR

SEQ ID NO: 244 - protein, 19 aa, Hepatitis B virus
QGILTTVPTAPPPASTNRQ

SEQ ID NO: 245 - protein, 19 aa, Hepatitis B virus
GILTTVPTAPPPASTNRQL

SEQ ID NO: 246 - protein, 19 aa, Hepatitis B virus
ILTTVPTAPPPASTNRQLG

SEQ ID NO: 247 - protein, 19 aa, Hepatitis B virus
LTTVPTAPPPASTNRQLGR

SEQ ID NO: 248 - protein, 19 aa, Hepatitis B virus
TTVPTAPPPASTNRQLGRK

SEQ ID NO: 249 - protein, 19 aa, Hepatitis B virus
TVPTAPPPASTNRQLGRKP

SEQ ID NO: 250 - protein, 19 aa, Hepatitis B virus
VPTAPPPASTNRQLGRKPT

SEQ ID NO: 251 - protein, 19 aa, Hepatitis B virus
PTAPPPASTNRQLGRKPTP

SEQ ID NO: 252 - protein, 20 aa, Hepatitis B virus
GLLGWSPQAQGILTTVPTAP

SEQ ID NO: 253 - protein, 20 aa, Hepatitis B virus
LLGWSPQAQGILTTVPTAPP

SEQ ID NO: 254 - protein, 20 aa, Hepatitis B virus
LGWSPQAQGILTTVPTAPPP

SEQ ID NO: 255 - protein, 20 aa, Hepatitis B virus
GWSPQAQGILTTVPTAPPPA

SEQ ID NO: 256 - protein, 20 aa, Hepatitis B virus
WSPQAQGILTTVPTAPPPAS

SEQ ID NO: 257 - protein, 20 aa, Hepatitis B virus
SPQAQGILTTVPTAPPPAST

SEQ ID NO: 258 - protein, 20 aa, Hepatitis B virus
PQAQGILTTVPTAPPPASTN

SEQ ID NO: 259 - protein, 20 aa, Hepatitis B virus
QAQGILTTVPTAPPPASTNR

SEQ ID NO: 260 - protein, 20 aa, Hepatitis B virus
AQGILTTVPTAPPPASTNRQ

SEQ ID NO: 261 - protein, 20 aa, Hepatitis B virus
QGILTTVPTAPPPASTNRQL

SEQ ID NO: 262 - protein, 20 aa, Hepatitis B virus
GILTTVPTAPPPASTNRQLG

SEQ ID NO: 263 - protein, 20 aa, Hepatitis B virus
ILTTVPTAPPPASTNRQLGR

SEQ ID NO: 264 - protein, 20 aa, Hepatitis B virus
LTTVPTAPPPASTNRQLGRK

SEQ ID NO: 265 - protein, 20 aa, Hepatitis B virus
TTVPTAPPPASTNRQLGRKP

SEQ ID NO: 266 - protein, 20 aa, Hepatitis B virus
TVPTAPPPASTNRQLGRKPT

SEQ ID NO: 267 - protein, 20 aa, Hepatitis B virus
VPTAPPPASTNRQLGRKPTP

SEQ ID NO: 268 - protein, 20 aa, Hepatitis B virus
PTAPPPASTNRQLGRKPTPL

SEQ ID NO: 269 - protein, 8 aa, human herpesvirus 1
RTAPPSAP

SEQ ID NO: 270 - protein, 8 aa, human herpesvirus 1
TAPPSAPI

SEQ ID NO: 271 - protein, 8 aa, human herpesvirus 1
APPSAPIG

SEQ ID NO: 272 - protein, 8 aa, human herpesvirus 1
PPSAPIGP

SEQ ID NO: 273 - protein, 8 aa, human herpesvirus 1
PSAPIGPH

SEQ ID NO: 274 - protein, 9 aa, human herpesvirus 1
ARTAPPSAP

SEQ ID NO: 275 - protein, 9 aa, human herpesvirus 1
RTAPPSAPI

SEQ ID NO: 276 - protein, 9 aa, human herpesvirus 1
TAPPSAPIG

SEQ ID NO: 277 - protein, 9 aa, human herpesvirus 1
APPSAPIGP

SEQ ID NO: 278 - protein, 9 aa, human herpesvirus 1
PPSAPIGPH

SEQ ID NO: 279 - protein, 9 aa, human herpesvirus 1
PSAPIGPHG

SEQ ID NO: 280 - protein, 10 aa, human herpesvirus 1
AARTAPPSAP

SEQ ID NO: 281 - protein, 10 aa, human herpesvirus 1
ARTAPPSAPI

SEQ ID NO: 282 - protein, 10 aa, human herpesvirus 1
RTAPPSAPIG

SEQ ID NO: 283 - protein, 10 aa, human herpesvirus 1
TAPPSAPIGP

SEQ ID NO: 284 - protein, 10 aa, human herpesvirus 1
APPSAPIGPH

SEQ ID NO: 285 - protein, 10 aa, human herpesvirus 1
PPSAPIGPHG

SEQ ID NO: 286 - protein, 10 aa, human herpesvirus 1
PSAPIGPHGS

SEQ ID NO: 287 - protein, 11 aa, human herpesvirus 1
AAARTAPPSAP

SEQ ID NO: 288 - protein, 11 aa, human herpesvirus 1
AARTAPPSAPI

SEQ ID NO: 289 - protein, 11 aa, human herpesvirus 1
ARTAPPSAPIG

SEQ ID NO: 290 - protein, 11 aa, human herpesvirus 1
RTAPPSAPIGP

SEQ ID NO: 291 - protein, 11 aa, human herpesvirus 1
TAPPSAPIGPH

SEQ ID NO: 292 - protein, 11 aa, human herpesvirus 1
APPSAPIGPHG

SEQ ID NO: 293 - protein, 11 aa, human herpesvirus 1
PPSAPIGPHGS

SEQ ID NO: 294 - protein, 11 aa, human herpesvirus 1
PSAPIGPHGSS

SEQ ID NO: 295 - protein, 12 aa, human herpesvirus 1
PAAARTAPPSAP

SEQ ID NO: 296 - protein, 12 aa, human herpesvirus 1
AAARTAPPSAPI

SEQ ID NO: 297 - protein, 12 aa, human herpesvirus 1
AARTAPPSAPIG

SEQ ID NO: 298 - protein, 12 aa, human herpesvirus 1
ARTAPPSAPIGP

SEQ ID NO: 299 - protein, 12 aa, human herpesvirus 1
RTAPPSAPIGPH

SEQ ID NO: 300 - protein, 12 aa, human herpesvirus 1
TAPPSAPIGPHG

SEQ ID NO: 301 - protein, 12 aa, human herpesvirus 1
APPSAPIGPHGS

SEQ ID NO: 302 - protein, 12 aa, human herpesvirus 1
PPSAPIGPHGSS

SEQ ID NO: 303 - protein, 12 aa, human herpesvirus 1
PSAPIGPHGSSN

SEQ ID NO: 304 - protein, 13 aa, human herpesvirus 1
QPAAARTAPPSAP

SEQ ID NO: 305 - protein, 13 aa, human herpesvirus 1
PAAARTAPPSAPI

SEQ ID NO: 306 - protein, 13 aa, human herpesvirus 1
AAARTAPPSAPIG

SEQ ID NO: 307 - protein, 13 aa, human herpesvirus 1
AARTAPPSAPIGP

SEQ ID NO: 308 - protein, 13 aa, human herpesvirus 1
ARTAPPSAPIGPH

SEQ ID NO: 309 - protein, 13 aa, human herpesvirus 1
RTAPPSAPIGPHG

SEQ ID NO: 310 - protein, 13 aa, human herpesvirus 1
TAPPSAPIGPHGS

SEQ ID NO: 311 - protein, 13 aa, human herpesvirus 1
APPSAPIGPHGSS

SEQ ID NO: 312 - protein, 13 aa, human herpesvirus 1
PPSAPIGPHGSSN

SEQ ID NO: 313 - protein, 13 aa, human herpesvirus 1
PSAPIGPHGSSNT

SEQ ID NO: 314 - protein, 14 aa, human herpesvirus 1
PQPAAARTAPPSAP

SEQ ID NO: 315 - protein, 14 aa, human herpesvirus 1
QPAAARTAPPSAPI

SEQ ID NO: 316 - protein, 14 aa, human herpesvirus 1
PAAARTAPPSAPIG

SEQ ID NO: 317 - protein, 14 aa, human herpesvirus 1
AAARTAPPSAPIGP

SEQ ID NO: 318 - protein, 14 aa, human herpesvirus 1
AARTAPPSAPIGPH

SEQ ID NO: 319 - protein, 14 aa, human herpesvirus 1
ARTAPPSAPIGPHG

SEQ ID NO: 320 - protein, 14 aa, human herpesvirus 1
RTAPPSAPIGPHGS

SEQ ID NO: 321 - protein, 14 aa, human herpesvirus 1
TAPPSAPIGPHGSS

SEQ ID NO: 322 - protein, 14 aa, human herpesvirus 1
APPSAPIGPHGSSN

SEQ ID NO: 323 - protein, 14 aa, human herpesvirus 1
PPSAPIGPHGSSNT

SEQ ID NO: 324 - protein, 14 aa, human herpesvirus 1
PSAPIGPHGSSNTN

SEQ ID NO: 325 - protein, 15 aa, human herpesvirus 1
APQPAAARTAPPSAP

SEQ ID NO: 326 - protein, 15 aa, human herpesvirus 1
PQPAAARTAPPSAPI

SEQ ID NO: 327 - protein, 15 aa, human herpesvirus 1
QPAAARTAPPSAPIG

SEQ ID NO: 328 - protein, 15 aa, human herpesvirus 1
PAAARTAPPSAPIGP

SEQ ID NO: 329 - protein, 15 aa, human herpesvirus 1
AAARTAPPSAPIGPH

SEQ ID NO: 330 - protein, 15 aa, human herpesvirus 1
AARTAPPSAPIGPHG

SEQ ID NO: 331 - protein, 15 aa, human herpesvirus 1
ARTAPPSAPIGPHGS

SEQ ID NO: 332 - protein, 15 aa, human herpesvirus 1
RTAPPSAPIGPHGSS

SEQ ID NO: 333 - protein, 15 aa, human herpesvirus 1
TAPPSAPIGPHGSSN

SEQ ID NO: 334 - protein, 15 aa, human herpesvirus 1
APPSAPIGPHGSSNT

SEQ ID NO: 335 - protein, 15 aa, human herpesvirus 1
PPSAPIGPHGSSNTN

SEQ ID NO: 336 - protein, 15 aa, human herpesvirus 1
PSAPIGPHGSSNTNT

SEQ ID NO: 337 - protein, 16 aa, human herpesvirus 1
AAPQPAAARTAPPSAP

SEQ ID NO: 338 - protein, 16 aa, human herpesvirus 1
APQPAAARTAPPSAPI

SEQ ID NO: 339 - protein, 16 aa, human herpesvirus 1
PQPAAARTAPPSAPIG

SEQ ID NO: 340 - protein, 16 aa, human herpesvirus 1
QPAAARTAPPSAPIGP

SEQ ID NO: 341 - protein, 16 aa, human herpesvirus 1
PAAARTAPPSAPIGPH

SEQ ID NO: 342 - protein, 16 aa, human herpesvirus 1
AAARTAPPSAPIGPHG

SEQ ID NO: 343 - protein, 16 aa, human herpesvirus 1
AARTAPPSAPIGPHGS

SEQ ID NO: 344 - protein, 16 aa, human herpesvirus 1
ARTAPPSAPIGPHGSS

SEQ ID NO: 345 - protein, 16 aa, human herpesvirus 1
RTAPPSAPIGPHGSSN

SEQ ID NO: 346 - protein, 16 aa, human herpesvirus 1
TAPPSAPIGPHGSSNT

SEQ ID NO: 347 - protein, 16 aa, human herpesvirus 1
APPSAPIGPHGSSNTN

SEQ ID NO: 348 - protein, 16 aa, human herpesvirus 1
PPSAPIGPHGSSNTNT

SEQ ID NO: 349 - protein, 16 aa, human herpesvirus 1
PSAPIGPHGSSNTNTT

SEQ ID NO: 350 - protein, 17 aa, human herpesvirus 1
HAAPQPAAARTAPPSAP

SEQ ID NO: 351 - protein, 17 aa, human herpesvirus 1
AAPQPAAARTAPPSAPI

SEQ ID NO: 352 - protein, 17 aa, human herpesvirus 1
APQPAAARTAPPSAPIG

SEQ ID NO: 353 - protein, 17 aa, human herpesvirus 1
PQPAAARTAPPSAPIGP

SEQ ID NO: 354 - protein, 17 aa, human herpesvirus 1
QPAAARTAPPSAPIGPH

SEQ ID NO: 355 - protein, 17 aa, human herpesvirus 1
PAAARTAPPSAPIGPHG

SEQ ID NO: 356 - protein, 17 aa, human herpesvirus 1
AAARTAPPSAPIGPHGS

SEQ ID NO: 357 - protein, 17 aa, human herpesvirus 1
AARTAPPSAPIGPHGSS

SEQ ID NO: 358 - protein, 17 aa, human herpesvirus 1
ARTAPPSAPIGPHGSSN

SEQ ID NO: 359 - protein, 17 aa, human herpesvirus 1
RTAPPSAPIGPHGSSNT

SEQ ID NO: 360 - protein, 17 aa, human herpesvirus 1
TAPPSAPIGPHGSSNTN

SEQ ID NO: 361 - protein, 17 aa, human herpesvirus 1
APPSAPIGPHGSSNTNT

SEQ ID NO: 362 - protein, 17 aa, human herpesvirus 1
PPSAPIGPHGSSNTNTT

SEQ ID NO: 363 - protein, 17 aa, human herpesvirus 1
PSAPIGPHGSSNTNTTT

SEQ ID NO: 364 - protein, 18 aa, human herpesvirus 1
SHAAPQPAAARTAPPSAP

SEQ ID NO: 365 - protein, 18 aa, human herpesvirus 1
HAAPQPAAARTAPPSAPI

SEQ ID NO: 366 - protein, 18 aa, human herpesvirus 1
AAPQPAAARTAPPSAPIG

SEQ ID NO: 367 - protein, 18 aa, human herpesvirus 1
APQPAAARTAPPSAPIGP

SEQ ID NO: 368 - protein, 18 aa, human herpesvirus 1
PQPAAARTAPPSAPIGPH

SEQ ID NO: 369 - protein, 18 aa, human herpesvirus 1
QPAAARTAPPSAPIGPHG

SEQ ID NO: 370 - protein, 18 aa, human herpesvirus 1
PAAARTAPPSAPIGPHGS

SEQ ID NO: 371 - protein, 18 aa, human herpesvirus 1
AAARTAPPSAPIGPHGSS

SEQ ID NO: 372 - protein, 18 aa, human herpesvirus 1
AARTAPPSAPIGPHGSSN

SEQ ID NO: 373 - protein, 18 aa, human herpesvirus 1
ARTAPPSAPIGPHGSSNT

SEQ ID NO: 374 - protein, 18 aa, human herpesvirus 1
RTAPPSAPIGPHGSSNTN

SEQ ID NO: 375 - protein, 18 aa, human herpesvirus 1
TAPPSAPIGPHGSSNTNT

SEQ ID NO: 376 - protein, 18 aa, human herpesvirus 1
APPSAPIGPHGSSNTNTT

SEQ ID NO: 377 - protein, 18 aa, human herpesvirus 1
PPSAPIGPHGSSNTNTTT

SEQ ID NO: 378 - protein, 18 aa, human herpesvirus 1
PSAPIGPHGSSNTNTTTN

SEQ ID NO: 379 - protein, 19 aa, human herpesvirus 1
ASHAAPQPAAARTAPPSAP

SEQ ID NO: 380 - protein, 19 aa, human herpesvirus 1
SHAAPQPAAARTAPPSAPI

SEQ ID NO: 381 - protein, 19 aa, human herpesvirus 1
HAAPQPAAARTAPPSAPIG

SEQ ID NO: 382 - protein, 19 aa, human herpesvirus 1
AAPQPAAARTAPPSAPIGP

SEQ ID NO: 383 - protein, 19 aa, human herpesvirus 1
APQPAAARTAPPSAPIGPH

SEQ ID NO: 384 - protein, 19 aa, human herpesvirus 1
PQPAAARTAPPSAPIGPHG

SEQ ID NO: 385 - protein, 19 aa, human herpesvirus 1
QPAAARTAPPSAPIGPHGS

SEQ ID NO: 386 - protein, 19 aa, human herpesvirus 1
PAAARTAPPSAPIGPHGSS

SEQ ID NO: 387 - protein, 19 aa, human herpesvirus 1
AAARTAPPSAPIGPHGSSN

SEQ ID NO: 388 - protein, 19 aa, human herpesvirus 1
AARTAPPSAPIGPHGSSNT

SEQ ID NO: 389 - protein, 19 aa, human herpesvirus 1
ARTAPPSAPIGPHGSSNTN

SEQ ID NO: 390 - protein, 19 aa, human herpesvirus 1
RTAPPSAPIGPHGSSNTNT

SEQ ID NO: 391 - protein, 19 aa, human herpesvirus 1
TAPPSAPIGPHGSSNTNTT

SEQ ID NO: 392 - protein, 19 aa, human herpesvirus 1
APPSAPIGPHGSSNTNTTT

SEQ ID NO: 393 - protein, 19 aa, human herpesvirus 1
PPSAPIGPHGSSNTNTTTN

SEQ ID NO: 394 - protein, 19 aa, human herpesvirus 1
PSAPIGPHGSSNTNTTTNS

SEQ ID NO: 395 - protein, 20 aa, human herpesvirus 1
GASHAAPQPAAARTAPPSAP

SEQ ID NO: 396 - protein, 20 aa, human herpesvirus 1
ASHAAPQPAAARTAPPSAPI

SEQ ID NO: 397 - protein, 20 aa, human herpesvirus 1
SHAAPQPAAARTAPPSAPIG

SEQ ID NO: 398 - protein, 20 aa, human herpesvirus 1
HAAPQPAAARTAPPSAPIGP

SEQ ID NO: 399 - protein, 20 aa, human herpesvirus 1
AAPQPAAARTAPPSAPIGPH

SEQ ID NO: 400 - protein, 20 aa, human herpesvirus 1
APQPAAARTAPPSAPIGPHG

SEQ ID NO: 401 - protein, 20 aa, human herpesvirus 1
PQPAAARTAPPSAPIGPHGS

SEQ ID NO: 402 - protein, 20 aa, human herpesvirus 1
QPAAARTAPPSAPIGPHGSS

SEQ ID NO: 403 - protein, 20 aa, human herpesvirus 1
PAAARTAPPSAPIGPHGSSN

SEQ ID NO: 404 - protein, 20 aa, human herpesvirus 1
AAARTAPPSAPIGPHGSSNT

SEQ ID NO: 405 - protein, 20 aa, human herpesvirus 1
AARTAPPSAPIGPHGSSNTN

SEQ ID NO: 406 - protein, 20 aa, human herpesvirus 1
ARTAPPSAPIGPHGSSNTNT

SEQ ID NO: 407 - protein, 20 aa, human herpesvirus 1
RTAPPSAPIGPHGSSNTNTT

SEQ ID NO: 408 - protein, 20 aa, human herpesvirus 1
TAPPSAPIGPHGSSNTNTTT

SEQ ID NO: 409 - protein, 20 aa, human herpesvirus 1
APPSAPIGPHGSSNTNTTTN

SEQ ID NO: 410 - protein, 20 aa, human herpesvirus 1
PPSAPIGPHGSSNTNTTTNS

SEQ ID NO: 411 - protein, 20 aa, human herpesvirus 1
PSAPIGPHGSSNTNTTTNSS

SEQ ID NO: 412 - protein, 8 aa, human herpesvirus 1
PPEYPTAP

SEQ ID NO: 413 - protein, 8 aa, human herpesvirus 1
PEYPTAPA

SEQ ID NO: 414 - protein, 8 aa, human herpesvirus 1
EYPTAPAS

SEQ ID NO: 415 - protein, 8 aa, human herpesvirus 1
YPTAPASE

SEQ ID NO: 416 - protein, 8 aa, human herpesvirus 1
PTAPASEW

SEQ ID NO: 417 - protein, 9 aa, human herpesvirus 1
MPPEYPTAP

SEQ ID NO: 418 - protein, 9 aa, human herpesvirus 1
PPEYPTAPA

SEQ ID NO: 419 - protein, 9 aa, human herpesvirus 1
PEYPTAPAS

SEQ ID NO: 420 - protein, 9 aa, human herpesvirus 1
EYPTAPASE

SEQ ID NO: 421 - protein, 9 aa, human herpesvirus 1
YPTAPASEW

SEQ ID NO: 422 - protein, 9 aa, human herpesvirus 1
PTAPASEWN

SEQ ID NO: 423 - protein, 10 aa, human herpesvirus 1
VMPPEYPTAP

SEQ ID NO: 424 - protein, 10 aa, human herpesvirus 1
MPPEYPTAPA

SEQ ID NO: 425 - protein, 10 aa, human herpesvirus 1
PPEYPTAPAS

SEQ ID NO: 426 - protein, 10 aa, human herpesvirus 1
PEYPTAPASE

SEQ ID NO: 427 - protein, 10 aa, human herpesvirus 1
EYPTAPASEW

SEQ ID NO: 428 - protein, 10 aa, human herpesvirus 1
YPTAPASEWN

SEQ ID NO: 429 - protein, 10 aa, human herpesvirus 1
PTAPASEWNS

SEQ ID NO: 430 - protein, 11 aa, human herpesvirus 1
HVMPPEYPTAP

SEQ ID NO: 431 - protein, 11 aa, human herpesvirus 1
VMPPEYPTAPA

SEQ ID NO: 432 - protein, 11 aa, human herpesvirus 1
MPPEYPTAPAS

SEQ ID NO: 433 - protein, 11 aa, human herpesvirus 1
PPEYPTAPASE

SEQ ID NO: 434 - protein, 11 aa, human herpesvirus 1
PEYPTAPASEW

SEQ ID NO: 435 - protein, 11 aa, human herpesvirus 1
EYPTAPASEWN

SEQ ID NO: 436 - protein, 11 aa, human herpesvirus 1
YPTAPASEWNS

SEQ ID NO: 437 - protein, 11 aa, human herpesvirus 1
PTAPASEWNSL

SEQ ID NO: 438 - protein, 12 aa, human herpesvirus 1
NHVMPPEYPTAP

SEQ ID NO: 439 - protein, 12 aa, human herpesvirus 1
HVMPPEYPTAPA

SEQ ID NO: 440 - protein, 12 aa, human herpesvirus 1
VMPPEYPTAPAS

SEQ ID NO: 441 - protein, 12 aa, human herpesvirus 1
MPPEYPTAPASE

SEQ ID NO: 442 - protein, 12 aa, human herpesvirus 1
PPEYPTAPASEW

SEQ ID NO: 443 - protein, 12 aa, human herpesvirus 1
PEYPTAPASEWN

SEQ ID NO: 444 - protein, 12 aa, human herpesvirus 1
EYPTAPASEWNS

SEQ ID NO: 445 - protein, 12 aa, human herpesvirus 1
YPTAPASEWNSL

SEQ ID NO: 446 - protein, 12 aa, human herpesvirus 1
PTAPASEWNSLW

SEQ ID NO: 447 - protein, 13 aa, human herpesvirus 1
GNHVMPPEYPTAP

SEQ ID NO: 448 - protein, 13 aa, human herpesvirus 1
NHVMPPEYPTAPA

SEQ ID NO: 449 - protein, 13 aa, human herpesvirus 1
HVMPPEYPTAPAS

SEQ ID NO: 450 - protein, 13 aa, human herpesvirus 1
VMPPEYPTAPASE

SEQ ID NO: 451 - protein, 13 aa, human herpesvirus 1
MPPEYPTAPASEW

SEQ ID NO: 452 - protein, 13 aa, human herpesvirus 1
PPEYPTAPASEWN

SEQ ID NO: 453 - protein, 13 aa, human herpesvirus 1
PEYPTAPASEWNS

SEQ ID NO: 454 - protein, 13 aa, human herpesvirus 1
EYPTAPASEWNSL

SEQ ID NO: 455 - protein, 13 aa, human herpesvirus 1
YPTAPASEWNSLW

SEQ ID NO: 456 - protein, 13 aa, human herpesvirus 1
PTAPASEWNSLWM

SEQ ID NO: 457 - protein, 14 aa, human herpesvirus 1
AGNHVMPPEYPTAP

SEQ ID NO: 458 - protein, 14 aa, human herpesvirus 1
GNHVMPPEYPTAPA

SEQ ID NO: 459 - protein, 14 aa, human herpesvirus 1
NHVMPPEYPTAPAS

SEQ ID NO: 460 - protein, 14 aa, human herpesvirus 1
HVMPPEYPTAPASE

SEQ ID NO: 461 - protein, 14 aa, human herpesvirus 1
VMPPEYPTAPASEW

SEQ ID NO: 462 - protein, 14 aa, human herpesvirus 1
MPPEYPTAPASEWN

SEQ ID NO: 463 - protein, 14 aa, human herpesvirus 1
PPEYPTAPASEWNS

SEQ ID NO: 464 - protein, 14 aa, human herpesvirus 1
PEYPTAPASEWNSL

SEQ ID NO: 465 - protein, 14 aa, human herpesvirus 1
EYPTAPASEWNSLW

SEQ ID NO: 466 - protein, 14 aa, human herpesvirus 1
YPTAPASEWNSLWM

SEQ ID NO: 467 - protein, 14 aa, human herpesvirus 1
PTAPASEWNSLWMT

SEQ ID NO: 468 - protein, 15 aa, human herpesvirus 1
TAGNHVMPPEYPTAP

SEQ ID NO: 469 - protein, 15 aa, human herpesvirus 1
AGNHVMPPEYPTAPA

SEQ ID NO: 470 - protein, 15 aa, human herpesvirus 1
GNHVMPPEYPTAPAS

SEQ ID NO: 471 - protein, 15 aa, human herpesvirus 1
NHVMPPEYPTAPASE

SEQ ID NO: 472 - protein, 15 aa, human herpesvirus 1
HVMPPEYPTAPASEW

SEQ ID NO: 473 - protein, 15 aa, human herpesvirus 1
VMPPEYPTAPASEWN

SEQ ID NO: 474 - protein, 15 aa, human herpesvirus 1
MPPEYPTAPASEWNS

SEQ ID NO: 475 - protein, 15 aa, human herpesvirus 1
PPEYPTAPASEWNSL

SEQ ID NO: 476 - protein, 15 aa, human herpesvirus 1
PEYPTAPASEWNSLW

SEQ ID NO: 477 - protein, 15 aa, human herpesvirus 1
EYPTAPASEWNSLWM

SEQ ID NO: 478 - protein, 15 aa, human herpesvirus 1
YPTAPASEWNSLWMT

SEQ ID NO: 479 - protein, 15 aa, human herpesvirus 1
PTAPASEWNSLWMTP

SEQ ID NO: 480 - protein, 16 aa, human herpesvirus 1
ETAGNHVMPPEYPTAP

SEQ ID NO: 481 - protein, 16 aa, human herpesvirus 1
TAGNHVMPPEYPTAPA

SEQ ID NO: 482 - protein, 16 aa, human herpesvirus 1
AGNHVMPPEYPTAPAS

SEQ ID NO: 483 - protein, 16 aa, human herpesvirus 1
GNHVMPPEYPTAPASE

SEQ ID NO: 484 - protein, 16 aa, human herpesvirus 1
NHVMPPEYPTAPASEW

SEQ ID NO: 485 - protein, 16 aa, human herpesvirus 1
HVMPPEYPTAPASEWN

SEQ ID NO: 486 - protein, 16 aa, human herpesvirus 1
VMPPEYPTAPASEWNS

SEQ ID NO: 487 - protein, 16 aa, human herpesvirus 1
MPPEYPTAPASEWNSL

SEQ ID NO: 488 - protein, 16 aa, human herpesvirus 1
PPEYPTAPASEWNSLW

SEQ ID NO: 489 - protein, 16 aa, human herpesvirus 1
PEYPTAPASEWNSLWM

SEQ ID NO: 490 - protein, 16 aa, human herpesvirus 1
EYPTAPASEWNSLWMT

SEQ ID NO: 491 - protein, 16 aa, human herpesvirus 1
YPTAPASEWNSLWMTP

SEQ ID NO: 492 - protein, 16 aa, human herpesvirus 1
PTAPASEWNSLWMTPV

SEQ ID NO: 493 - protein, 17 aa, human herpesvirus 1
PETAGNHVMPPEYPTAP

SEQ ID NO: 494 - protein, 17 aa, human herpesvirus 1
ETAGNHVMPPEYPTAPA

SEQ ID NO: 495 - protein, 17 aa, human herpesvirus 1
TAGNHVMPPEYPTAPAS

SEQ ID NO: 496 - protein, 17 aa, human herpesvirus 1
AGNHVMPPEYPTAPASE

SEQ ID NO: 497 - protein, 17 aa, human herpesvirus 1
GNHVMPPEYPTAPASEW

SEQ ID NO: 498 - protein, 17 aa, human herpesvirus 1
NHVMPPEYPTAPASEWN

SEQ ID NO: 499 - protein, 17 aa, human herpesvirus 1
HVMPPEYPTAPASEWNS

SEQ ID NO: 500 - protein, 17 aa, human herpesvirus 1
VMPPEYPTAPASEWNSL

SEQ ID NO: 501 - protein, 17 aa, human herpesvirus 1
MPPEYPTAPASEWNSLW

SEQ ID NO: 502 - protein, 17 aa, human herpesvirus 1
PPEYPTAPASEWNSLWM

SEQ ID NO: 503 - protein, 17 aa, human herpesvirus 1
PEYPTAPASEWNSLWMT

SEQ ID NO: 504 - protein, 17 aa, human herpesvirus 1
EYPTAPASEWNSLWMTP

SEQ ID NO: 505 - protein, 17 aa, human herpesvirus 1
YPTAPASEWNSLWMTPV

SEQ ID NO: 506 - protein, 17 aa, human herpesvirus 1
PTAPASEWNSLWMTPVG

SEQ ID NO: 507 - protein, 18 aa, human herpesvirus 1
LPETAGNHVMPPEYPTAP

SEQ ID NO: 508 - protein, 18 aa, human herpesvirus 1
PETAGNHVMPPEYPTAPA

SEQ ID NO: 509 - protein, 18 aa, human herpesvirus 1
ETAGNHVMPPEYPTAPAS

SEQ ID NO: 510 - protein, 18 aa, human herpesvirus 1
TAGNHVMPPEYPTAPASE

SEQ ID NO: 511 - protein, 18 aa, human herpesvirus 1
AGNHVMPPEYPTAPASEW

SEQ ID NO: 512 - protein, 18 aa, human herpesvirus 1
GNHVMPPEYPTAPASEWN

SEQ ID NO: 513 - protein, 18 aa, human herpesvirus 1
NHVMPPEYPTAPASEWNS

SEQ ID NO: 514 - protein, 18 aa, human herpesvirus 1
HVMPPEYPTAPASEWNSL

SEQ ID NO: 515 - protein, 18 aa, human herpesvirus 1
VMPPEYPTAPASEWNSLW

SEQ ID NO: 516 - protein, 18 aa, human herpesvirus 1
MPPEYPTAPASEWNSLWM

SEQ ID NO: 517 - protein, 18 aa, human herpesvirus 1
PPEYPTAPASEWNSLWMT

SEQ ID NO: 518 - protein, 18 aa, human herpesvirus 1
PEYPTAPASEWNSLWMTP

SEQ ID NO: 519 - protein, 18 aa, human herpesvirus 1
EYPTAPASEWNSLWMTPV

SEQ ID NO: 520 - protein, 18 aa, human herpesvirus 1
YPTAPASEWNSLWMTPVG

SEQ ID NO: 521 - protein, 18 aa, human herpesvirus 1
PTAPASEWNSLWMTPVGN

SEQ ID NO: 522 - protein, 19 aa, human herpesvirus 1
LLPETAGNHVMPPEYPTAP

SEQ ID NO: 523 - protein, 19 aa, human herpesvirus 1
LPETAGNHVMPPEYPTAPA

SEQ ID NO: 524 - protein, 19 aa, human herpesvirus 1
PETAGNHVMPPEYPTAPAS

SEQ ID NO: 525 - protein, 19 aa, human herpesvirus 1
ETAGNHVMPPEYPTAPASE

SEQ ID NO: 526 - protein, 19 aa, human herpesvirus 1
TAGNHVMPPEYPTAPASEW

SEQ ID NO: 527 - protein, 19 aa, human herpesvirus 1
AGNHVMPPEYPTAPASEWN

SEQ ID NO: 528 - protein, 19 aa, human herpesvirus 1
GNHVMPPEYPTAPASEWNS

SEQ ID NO: 529 - protein, 19 aa, human herpesvirus 1
NHVMPPEYPTAPASEWNSL

SEQ ID NO: 530 - protein, 19 aa, human herpesvirus 1
HVMPPEYPTAPASEWNSLW

SEQ ID NO: 531 - protein, 19 aa, human herpesvirus 1
VMPPEYPTAPASEWNSLWM

SEQ ID NO: 532 - protein, 19 aa, human herpesvirus 1
MPPEYPTAPASEWNSLWMT

SEQ ID NO: 533 - protein, 19 aa, human herpesvirus 1
PPEYPTAPASEWNSLWMTP

SEQ ID NO: 534 - protein, 19 aa, human herpesvirus 1
PEYPTAPASEWNSLWMTPV

SEQ ID NO: 535 - protein, 19 aa, human herpesvirus 1
EYPTAPASEWNSLWMTPVG

SEQ ID NO: 536 - protein, 19 aa, human herpesvirus 1
YPTAPASEWNSLWMTPVGN

SEQ ID NO: 537 - protein, 19 aa, human herpesvirus 1
PTAPASEWNSLWMTPVGNM

SEQ ID NO: 538 - protein, 20 aa, human herpesvirus 1
TLLPETAGNHVMPPEYPTAP

SEQ ID NO: 539 - protein, 20 aa, human herpesvirus 1
LLPETAGNHVMPPEYPTAPA

SEQ ID NO: 540 - protein, 20 aa, human herpesvirus 1
LPETAGNHVMPPEYPTAPAS

SEQ ID NO: 541 - protein, 20 aa, human herpesvirus 1
PETAGNHVMPPEYPTAPASE

SEQ ID NO: 542 - protein, 20 aa, human herpesvirus 1
ETAGNHVMPPEYPTAPASEW

SEQ ID NO: 543 - protein, 20 aa, human herpesvirus 1
TAGNHVMPPEYPTAPASEWN

SEQ ID NO: 544 - protein, 20 aa, human herpesvirus 1
AGNHVMPPEYPTAPASEWNS

SEQ ID NO: 545 - protein, 20 aa, human herpesvirus 1
GNHVMPPEYPTAPASEWNSL

SEQ ID NO: 546 - protein, 20 aa, human herpesvirus 1
NHVMPPEYPTAPASEWNSLW

SEQ ID NO: 547 - protein, 20 aa, human herpesvirus 1
HVMPPEYPTAPASEWNSLWM

SEQ ID NO: 548 - protein, 20 aa, human herpesvirus 1
VMPPEYPTAPASEWNSLWMT

SEQ ID NO: 549 - protein, 20 aa, human herpesvirus 1
MPPEYPTAPASEWNSLWMTP

SEQ ID NO: 550 - protein, 20 aa, human herpesvirus 1
PPEYPTAPASEWNSLWMTPV

SEQ ID NO: 551 - protein, 20 aa, human herpesvirus 1
PEYPTAPASEWNSLWMTPVG

SEQ ID NO: 552 - protein, 20 aa, human herpesvirus 1
EYPTAPASEWNSLWMTPVGN

SEQ ID NO: 553 - protein, 20 aa, human herpesvirus 1
YPTAPASEWNSLWMTPVGNM

SEQ ID NO: 554 - protein, 20 aa, human herpesvirus 1
PTAPASEWNSLWMTPVGNML

SEQ ID NO: 555 - protein, 8 aa, human herpesvirus 1
FLGPPTAP

SEQ ID NO: 556 - protein, 8 aa, human herpesvirus 1
LGPPTAPP

SEQ ID NO: 557 - protein, 8 aa, human herpesvirus 1
GPPTAPPG

SEQ ID NO: 558 - protein, 8 aa, human herpesvirus 1
PPTAPPGG

SEQ ID NO: 559 - protein, 8 aa, human herpesvirus 1
PTAPPGGA

SEQ ID NO: 560 - protein, 9 aa, human herpesvirus 1
LFLGPPTAP

SEQ ID NO: 561 - protein, 9 aa, human herpesvirus 1
FLGPPTAPP

SEQ ID NO: 562 - protein, 9 aa, human herpesvirus 1
LGPPTAPPG

SEQ ID NO: 563 - protein, 9 aa, human herpesvirus 1
GPPTAPPGG

SEQ ID NO: 564 - protein, 9 aa, human herpesvirus 1
PPTAPPGGA

SEQ ID NO: 565 - protein, 9 aa, human herpesvirus 1
PTAPPGGAW

SEQ ID NO: 566 - protein, 10 aa, human herpesvirus 1
LLFLGPPTAP

SEQ ID NO: 567 - protein, 10 aa, human herpesvirus 1
LFLGPPTAPP

SEQ ID NO: 568 - protein, 10 aa, human herpesvirus 1
FLGPPTAPPG

SEQ ID NO: 569 - protein, 10 aa, human herpesvirus 1
LGPPTAPPGG

SEQ ID NO: 570 - protein, 10 aa, human herpesvirus 1
GPPTAPPGGA

SEQ ID NO: 571 - protein, 10 aa, human herpesvirus 1
PPTAPPGGAW

SEQ ID NO: 572 - protein, 10 aa, human herpesvirus 1
PTAPPGGAWT

SEQ ID NO: 573 - protein, 11 aa, human herpesvirus 1
TLLFLGPPTAP

SEQ ID NO: 574 - protein, 11 aa, human herpesvirus 1
LLFLGPPTAPP

SEQ ID NO: 575 - protein, 11 aa, human herpesvirus 1
LFLGPPTAPPG

SEQ ID NO: 576 - protein, 11 aa, human herpesvirus 1
FLGPPTAPPGG

SEQ ID NO: 577 - protein, 11 aa, human herpesvirus 1
LGPPTAPPGGA

SEQ ID NO: 578 - protein, 11 aa, human herpesvirus 1
GPPTAPPGGAW

SEQ ID NO: 579 - protein, 11 aa, human herpesvirus 1
PPTAPPGGAWT

SEQ ID NO: 580 - protein, 11 aa, human herpesvirus 1
PTAPPGGAWTP

SEQ ID NO: 581 - protein, 12 aa, human herpesvirus 1
QTLLFLGPPTAP

SEQ ID NO: 582 - protein, 12 aa, human herpesvirus 1
TLLFLGPPTAPP

SEQ ID NO: 583 - protein, 12 aa, human herpesvirus 1
LLFLGPPTAPPG

SEQ ID NO: 584 - protein, 12 aa, human herpesvirus 1
LFLGPPTAPPGG

SEQ ID NO: 585 - protein, 12 aa, human herpesvirus 1
FLGPPTAPPGGA

SEQ ID NO: 586 - protein, 12 aa, human herpesvirus 1
LGPPTAPPGGAW

SEQ ID NO: 587 - protein, 12 aa, human herpesvirus 1
GPPTAPPGGAWT

SEQ ID NO: 588 - protein, 12 aa, human herpesvirus 1
PPTAPPGGAWTP

SEQ ID NO: 589 - protein, 12 aa, human herpesvirus 1
PTAPPGGAWTPH

SEQ ID NO: 590 - protein, 13 aa, human herpesvirus 1
NQTLLFLGPPTAP

SEQ ID NO: 591 - protein, 13 aa, human herpesvirus 1
QTLLFLGPPTAPP

SEQ ID NO: 592 - protein, 13 aa, human herpesvirus 1
TLLFLGPPTAPPG

SEQ ID NO: 593 - protein, 13 aa, human herpesvirus 1
LLFLGPPTAPPGG

SEQ ID NO: 594 - protein, 13 aa, human herpesvirus 1
LFLGPPTAPPGGA

SEQ ID NO: 595 - protein, 13 aa, human herpesvirus 1
FLGPPTAPPGGAW

SEQ ID NO: 596 - protein, 13 aa, human herpesvirus 1
LGPPTAPPGGAWT

SEQ ID NO: 597 - protein, 13 aa, human herpesvirus 1
GPPTAPPGGAWTP

SEQ ID NO: 598 - protein, 13 aa, human herpesvirus 1
PPTAPPGGAWTPH

SEQ ID NO: 599 - protein, 13 aa, human herpesvirus 1
PTAPPGGAWTPHA

SEQ ID NO: 600 - protein, 14 aa, human herpesvirus 1
INQTLLFLGPPTAP

SEQ ID NO: 601 - protein, 14 aa, human herpesvirus 1
NQTLLFLGPPTAPP

SEQ ID NO: 602 - protein, 14 aa, human herpesvirus 1
QTLLFLGPPTAPPG

SEQ ID NO: 603 - protein, 14 aa, human herpesvirus 1
TLLFLGPPTAPPGG

SEQ ID NO: 604 - protein, 14 aa, human herpesvirus 1
LLFLGPPTAPPGGA

SEQ ID NO: 605 - protein, 14 aa, human herpesvirus 1
LFLGPPTAPPGGAW

SEQ ID NO: 606 - protein, 14 aa, human herpesvirus 1
FLGPPTAPPGGAWT

SEQ ID NO: 607 - protein, 14 aa, human herpesvirus 1
LGPPTAPPGGAWTP

SEQ ID NO: 608 - protein, 14 aa, human herpesvirus 1
GPPTAPPGGAWTPH

SEQ ID NO: 609 - protein, 14 aa, human herpesvirus 1
PPTAPPGGAWTPHA

SEQ ID NO: 610 - protein, 14 aa, human herpesvirus 1
PTAPPGGAWTPHAR

SEQ ID NO: 611 - protein, 15 aa, human herpesvirus 1
KINQTLLFLGPPTAP

SEQ ID NO: 612 - protein, 15 aa, human herpesvirus 1
INQTLLFLGPPTAPP

SEQ ID NO: 613 - protein, 15 aa, human herpesvirus 1
NQTLLFLGPPTAPPG

SEQ ID NO: 614 - protein, 15 aa, human herpesvirus 1
QTLLFLGPPTAPPGG

SEQ ID NO: 615 - protein, 15 aa, human herpesvirus 1
TLLFLGPPTAPPGGA

SEQ ID NO: 616 - protein, 15 aa, human herpesvirus 1
LLFLGPPTAPPGGAW

SEQ ID NO: 617 - protein, 15 aa, human herpesvirus 1
LFLGPPTAPPGGAWT

SEQ ID NO: 618 - protein, 15 aa, human herpesvirus 1
FLGPPTAPPGGAWTP

SEQ ID NO: 619 - protein, 15 aa, human herpesvirus 1
LGPPTAPPGGAWTPH

SEQ ID NO: 620 - protein, 15 aa, human herpesvirus 1
GPPTAPPGGAWTPHA

SEQ ID NO: 621 - protein, 15 aa, human herpesvirus 1
PPTAPPGGAWTPHAR

SEQ ID NO: 622 - protein, 15 aa, human herpesvirus 1
PTAPPGGAWTPHARV

SEQ ID NO: 623 - protein, 16 aa, human herpesvirus 1
MKINQTLLFLGPPTAP

SEQ ID NO: 624 - protein, 16 aa, human herpesvirus 1
KINQTLLFLGPPTAPP

SEQ ID NO: 625 - protein, 16 aa, human herpesvirus 1
INQTLLFLGPPTAPPG

SEQ ID NO: 626 - protein, 16 aa, human herpesvirus 1
NQTLLFLGPPTAPPGG

SEQ ID NO: 627 - protein, 16 aa, human herpesvirus 1
QTLLFLGPPTAPPGGA

SEQ ID NO: 628 - protein, 16 aa, human herpesvirus 1
TLLFLGPPTAPPGGAW

SEQ ID NO: 629 - protein, 16 aa, human herpesvirus 1
LLFLGPPTAPPGGAWT

SEQ ID NO: 630 - protein, 16 aa, human herpesvirus 1
LFLGPPTAPPGGAWTP

SEQ ID NO: 631 - protein, 16 aa, human herpesvirus 1
FLGPPTAPPGGAWTPH

SEQ ID NO: 632 - protein, 16 aa, human herpesvirus 1
LGPPTAPPGGAWTPHA

SEQ ID NO: 633 - protein, 16 aa, human herpesvirus 1
GPPTAPPGGAWTPHAR

SEQ ID NO: 634 - protein, 16 aa, human herpesvirus 1
PPTAPPGGAWTPHARV

SEQ ID NO: 635 - protein, 16 aa, human herpesvirus 1
PTAPPGGAWTPHARVC

SEQ ID NO: 636 - protein, 17 aa, human herpesvirus 1
WMKINQTLLFLGPPTAP

SEQ ID NO: 637 - protein, 17 aa, human herpesvirus 1
MKINQTLLFLGPPTAPP

SEQ ID NO: 638 - protein, 17 aa, human herpesvirus 1
KINQTLLFLGPPTAPPG

SEQ ID NO: 639 - protein, 17 aa, human herpesvirus 1
INQTLLFLGPPTAPPGG

SEQ ID NO: 640 - protein, 17 aa, human herpesvirus 1
NQTLLFLGPPTAPPGGA

SEQ ID NO: 641 - protein, 17 aa, human herpesvirus 1
QTLLFLGPPTAPPGGAW

SEQ ID NO: 642 - protein, 17 aa, human herpesvirus 1
TLLFLGPPTAPPGGAWT

SEQ ID NO: 643 - protein, 17 aa, human herpesvirus 1
LLFLGPPTAPPGGAWTP

SEQ ID NO: 644 - protein, 17 aa, human herpesvirus 1
LFLGPPTAPPGGAWTPH

SEQ ID NO: 645 - protein, 17 aa, human herpesvirus 1
FLGPPTAPPGGAWTPHA

SEQ ID NO: 646 - protein, 17 aa, human herpesvirus 1
LGPPTAPPGGAWTPHAR

SEQ ID NO: 647 - protein, 17 aa, human herpesvirus 1
GPPTAPPGGAWTPHARV

SEQ ID NO: 648 - protein, 17 aa, human herpesvirus 1
PPTAPPGGAWTPHARVC

SEQ ID NO: 649 - protein, 17 aa, human herpesvirus 1
PTAPPGGAWTPHARVCY

SEQ ID NO: 650 - protein, 18 aa, human herpesvirus 1
VWMKINQTLLFLGPPTAP

SEQ ID NO: 651 - protein, 18 aa, human herpesvirus 1
WMKINQTLLFLGPPTAPP

SEQ ID NO: 652 - protein, 18 aa, human herpesvirus 1
MKINQTLLFLGPPTAPPG

SEQ ID NO: 653 - protein, 18 aa, human herpesvirus 1
KINQTLLFLGPPTAPPGG

SEQ ID NO: 654 - protein, 18 aa, human herpesvirus 1
INQTLLFLGPPTAPPGGA

SEQ ID NO: 655 - protein, 18 aa, human herpesvirus 1
NQTLLFLGPPTAPPGGAW

SEQ ID NO: 656 - protein, 18 aa, human herpesvirus 1
QTLLFLGPPTAPPGGAWT

SEQ ID NO: 657 - protein, 18 aa, human herpesvirus 1
TLLFLGPPTAPPGGAWTP

SEQ ID NO: 658 - protein, 18 aa, human herpesvirus 1
LLFLGPPTAPPGGAWTPH

SEQ ID NO: 659 - protein, 18 aa, human herpesvirus 1
LFLGPPTAPPGGAWTPHA

SEQ ID NO: 660 - protein, 18 aa, human herpesvirus 1
FLGPPTAPPGGAWTPHAR

SEQ ID NO: 661 - protein, 18 aa, human herpesvirus 1
LGPPTAPPGGAWTPHARV

SEQ ID NO: 662 - protein, 18 aa, human herpesvirus 1
GPPTAPPGGAWTPHARVC

SEQ ID NO: 663 - protein, 18 aa, human herpesvirus 1
PPTAPPGGAWTPHARVCY

SEQ ID NO: 664 - protein, 18 aa, human herpesvirus 1
PTAPPGGAWTPHARVCYA

SEQ ID NO: 665 - protein, 19 aa, human herpesvirus 1
LVWMKINQTLLFLGPPTAP

SEQ ID NO: 666 - protein, 19 aa, human herpesvirus 1
VWMKINQTLLFLGPPTAPP

SEQ ID NO: 667 - protein, 19 aa, human herpesvirus 1
WMKINQTLLFLGPPTAPPG

SEQ ID NO: 668 - protein, 19 aa, human herpesvirus 1
MKINQTLLFLGPPTAPPGG

SEQ ID NO: 669 - protein, 19 aa, human herpesvirus 1
KINQTLLFLGPPTAPPGGA

SEQ ID NO: 670 - protein, 19 aa, human herpesvirus 1
INQTLLFLGPPTAPPGGAW

SEQ ID NO: 671 - protein, 19 aa, human herpesvirus 1
NQTLLFLGPPTAPPGGAWT

SEQ ID NO: 672 - protein, 19 aa, human herpesvirus 1
QTLLFLGPPTAPPGGAWTP

SEQ ID NO: 673 - protein, 19 aa, human herpesvirus 1
TLLFLGPPTAPPGGAWTPH

SEQ ID NO: 674 - protein, 19 aa, human herpesvirus 1
LLFLGPPTAPPGGAWTPHA

SEQ ID NO: 675 - protein, 19 aa, human herpesvirus 1
LFLGPPTAPPGGAWTPHAR

SEQ ID NO: 676 - protein, 19 aa, human herpesvirus 1
FLGPPTAPPGGAWTPHARV

SEQ ID NO: 677 - protein, 19 aa, human herpesvirus 1
LGPPTAPPGGAWTPHARVC

SEQ ID NO: 678 - protein, 19 aa, human herpesvirus 1
GPPTAPPGGAWTPHARVCY

SEQ ID NO: 679 - protein, 19 aa, human herpesvirus 1
PPTAPPGGAWTPHARVCYA

SEQ ID NO: 680 - protein, 19 aa, human herpesvirus 1
PTAPPGGAWTPHARVCYAN

SEQ ID NO: 681 - protein, 20 aa, human herpesvirus 1
ALVWMKINQTLLFLGPPTAP

SEQ ID NO: 682 - protein, 20 aa, human herpesvirus 1
LVWMKINQTLLFLGPPTAPP

SEQ ID NO: 683 - protein, 20 aa, human herpesvirus 1
VWMKINQTLLFLGPPTAPPG

SEQ ID NO: 684 - protein, 20 aa, human herpesvirus 1
WMKINQTLLFLGPPTAPPGG

SEQ ID NO: 685 - protein, 20 aa, human herpesvirus 1
MKINQTLLFLGPPTAPPGGA

SEQ ID NO: 686 - protein, 20 aa, human herpesvirus 1
KINQTLLFLGPPTAPPGGAW

SEQ ID NO: 687 - protein, 20 aa, human herpesvirus 1
INQTLLFLGPPTAPPGGAWT

SEQ ID NO: 688 - protein, 20 aa, human herpesvirus 1
NQTLLFLGPPTAPPGGAWTP

SEQ ID NO: 689 - protein, 20 aa, human herpesvirus 1
QTLLFLGPPTAPPGGAWTPH

SEQ ID NO: 690 - protein, 20 aa, human herpesvirus 1
TLLFLGPPTAPPGGAWTPHA

SEQ ID NO: 691 - protein, 20 aa, human herpesvirus 1
LLFLGPPTAPPGGAWTPHAR

SEQ ID NO: 692 - protein, 20 aa, human herpesvirus 1
LFLGPPTAPPGGAWTPHARV

SEQ ID NO: 693 - protein, 20 aa, human herpesvirus 1
FLGPPTAPPGGAWTPHARVC

SEQ ID NO: 694 - protein, 20 aa, human herpesvirus 1
LGPPTAPPGGAWTPHARVCY

SEQ ID NO: 695 - protein, 20 aa, human herpesvirus 1
GPPTAPPGGAWTPHARVCYA

SEQ ID NO: 696 - protein, 20 aa, human herpesvirus 1
PPTAPPGGAWTPHARVCYAN

SEQ ID NO: 697 - protein, 20 aa, human herpesvirus 1
PTAPPGGAWTPHARVCYANI

SEQ ID NO: 698 - protein, 8 aa, human herpesvirus 2
PRSGPTAP

SEQ ID NO: 699 - protein, 8 aa, human herpesvirus 2
RSGPTAPQ

SEQ ID NO: 700 - protein, 8 aa, human herpesvirus 2
SGPTAPQE

SEQ ID NO: 701 - protein, 8 aa, human herpesvirus 2
GPTAPQEV

SEQ ID NO: 702 - protein, 9 aa, human herpesvirus 2
RPRSGPTAP

SEQ ID NO: 703 - protein, 9 aa, human herpesvirus 2
PRSGPTAPQ

SEQ ID NO: 704 - protein, 9 aa, human herpesvirus 2
RSGPTAPQE

SEQ ID NO: 705 - protein, 9 aa, human herpesvirus 2
SGPTAPQEV

SEQ ID NO: 706 - protein, 10 aa, human herpesvirus 2
PRPRSGPTAP

SEQ ID NO: 707 - protein, 10 aa, human herpesvirus 2
RPRSGPTAPQ

SEQ ID NO: 708 - protein, 10 aa, human herpesvirus 2
PRSGPTAPQE

SEQ ID NO: 709 - protein, 10 aa, human herpesvirus 2
RSGPTAPQEV

SEQ ID NO: 710 - protein, 11 aa, human herpesvirus 2
SPRPRSGPTAP

SEQ ID NO: 711 - protein, 11 aa, human herpesvirus 2
PRPRSGPTAPQ

SEQ ID NO: 712 - protein, 11 aa, human herpesvirus 2
RPRSGPTAPQE

SEQ ID NO: 713 - protein, 11 aa, human herpesvirus 2
PRSGPTAPQEV

SEQ ID NO: 714 - protein, 12 aa, human herpesvirus 2
VSPRPRSGPTAP

SEQ ID NO: 715 - protein, 12 aa, human herpesvirus 2
SPRPRSGPTAPQ

SEQ ID NO: 716 - protein, 12 aa, human herpesvirus 2
PRPRSGPTAPQE

SEQ ID NO: 717 - protein, 12 aa, human herpesvirus 2
RPRSGPTAPQEV

SEQ ID NO: 718 - protein, 13 aa, human herpesvirus 2
SVSPRPRSGPTAP

SEQ ID NO: 719 - protein, 13 aa, human herpesvirus 2
VSPRPRSGPTAPQ

SEQ ID NO: 720 - protein, 13 aa, human herpesvirus 2
SPRPRSGPTAPQE

SEQ ID NO: 721 - protein, 13 aa, human herpesvirus 2
PRPRSGPTAPQEV

SEQ ID NO: 722 - protein, 14 aa, human herpesvirus 2
LSVSPRPRSGPTAP

SEQ ID NO: 723 - protein, 14 aa, human herpesvirus 2
SVSPRPRSGPTAPQ

SEQ ID NO: 724 - protein, 14 aa, human herpesvirus 2
VSPRPRSGPTAPQE

SEQ ID NO: 725 - protein, 14 aa, human herpesvirus 2
SPRPRSGPTAPQEV

SEQ ID NO: 726 - protein, 15 aa, human herpesvirus 2
LLSVSPRPRSGPTAP

SEQ ID NO: 727 - protein, 15 aa, human herpesvirus 2
LSVSPRPRSGPTAPQ

SEQ ID NO: 728 - protein, 15 aa, human herpesvirus 2
SVSPRPRSGPTAPQE

SEQ ID NO: 729 - protein, 15 aa, human herpesvirus 2
VSPRPRSGPTAPQEV

SEQ ID NO: 730 - protein, 16 aa, human herpesvirus 2
VLLSVSPRPRSGPTAP

SEQ ID NO: 731 - protein, 16 aa, human herpesvirus 2
LLSVSPRPRSGPTAPQ

SEQ ID NO: 732 - protein, 16 aa, human herpesvirus 2
LSVSPRPRSGPTAPQE

SEQ ID NO: 733 - protein, 16 aa, human herpesvirus 2
SVSPRPRSGPTAPQEV

SEQ ID NO: 734 - protein, 17 aa, human herpesvirus 2
VVLLSVSPRPRSGPTAP

SEQ ID NO: 735 - protein, 17 aa, human herpesvirus 2
VLLSVSPRPRSGPTAPQ

SEQ ID NO: 736 - protein, 17 aa, human herpesvirus 2
LLSVSPRPRSGPTAPQE

SEQ ID NO: 737 - protein, 17 aa, human herpesvirus 2
LSVSPRPRSGPTAPQEV

SEQ ID NO: 738 - protein, 18 aa, human herpesvirus 2
PVVLLSVSPRPRSGPTAP

SEQ ID NO: 739 - protein, 18 aa, human herpesvirus 2
VVLLSVSPRPRSGPTAPQ

SEQ ID NO: 740 - protein, 18 aa, human herpesvirus 2
VLLSVSPRPRSGPTAPQE

SEQ ID NO: 741 - protein, 18 aa, human herpesvirus 2
LLSVSPRPRSGPTAPQEV

SEQ ID NO: 742 - protein, 19 aa, human herpesvirus 2
GPVVLLSVSPRPRSGPTAP

SEQ ID NO: 743 - protein, 19 aa, human herpesvirus 2
PVVLLSVSPRPRSGPTAPQ

SEQ ID NO: 744 - protein, 19 aa, human herpesvirus 2
VVLLSVSPRPRSGPTAPQE

SEQ ID NO: 745 - protein, 19 aa, human herpesvirus 2
VLLSVSPRPRSGPTAPQEV

SEQ ID NO: 746 - protein, 20 aa, human herpesvirus 2
PGPVVLLSVSPRPRSGPTAP

SEQ ID NO: 747 - protein, 20 aa, human herpesvirus 2
GPVVLLSVSPRPRSGPTAPQ

SEQ ID NO: 748 - protein, 20 aa, human herpesvirus 2
PVVLLSVSPRPRSGPTAPQE

SEQ ID NO: 749 - protein, 20 aa, human herpesvirus 2
VVLLSVSPRPRSGPTAPQEV

SEQ ID NO: 750 - protein, 8 aa, Human herpesvirus 4
PPLRPTAP

SEQ ID NO: 751 - protein, 8 aa, Human herpesvirus 4
PLRPTAPT

SEQ ID NO: 752 - protein, 8 aa, Human herpesvirus 4
LRPTAPTI

SEQ ID NO: 753 - protein, 8 aa, Human herpesvirus 4
RPTAPTIL

SEQ ID NO: 754 - protein, 8 aa, Human herpesvirus 4
PTAPTILS

SEQ ID NO: 755 - protein, 9 aa, Human herpesvirus 4
VPPLRPTAP

SEQ ID NO: 756 - protein, 9 aa, Human herpesvirus 4
PPLRPTAPT

SEQ ID NO: 757 - protein, 9 aa, Human herpesvirus 4
PLRPTAPTI

SEQ ID NO: 758 - protein, 9 aa, Human herpesvirus 4
LRPTAPTIL

SEQ ID NO: 759 - protein, 9 aa, Human herpesvirus 4
RPTAPTILS

SEQ ID NO: 760 - protein, 9 aa, Human herpesvirus 4
PTAPTILSP

SEQ ID NO: 761 - protein, 10 aa, Human herpesvirus 4
HVPPLRPTAP

SEQ ID NO: 762 - protein, 10 aa, Human herpesvirus 4
VPPLRPTAPT

SEQ ID NO: 763 - protein, 10 aa, Human herpesvirus 4
PPLRPTAPTI

SEQ ID NO: 764 - protein, 10 aa, Human herpesvirus 4
PLRPTAPTIL

SEQ ID NO: 765 - protein, 10 aa, Human herpesvirus 4
LRPTAPTILS

SEQ ID NO: 766 - protein, 10 aa, Human herpesvirus 4
RPTAPTILSP

SEQ ID NO: 767 - protein, 10 aa, Human herpesvirus 4
PTAPTILSPL

SEQ ID NO: 768 - protein, 11 aa, Human herpesvirus 4
PHVPPLRPTAP

SEQ ID NO: 769 - protein, 11 aa, Human herpesvirus 4
HVPPLRPTAPT

SEQ ID NO: 770 - protein, 11 aa, Human herpesvirus 4
VPPLRPTAPTI

SEQ ID NO: 771 - protein, 11 aa, Human herpesvirus 4
PPLRPTAPTIL

SEQ ID NO: 772 - protein, 11 aa, Human herpesvirus 4
PLRPTAPTILS

SEQ ID NO: 773 - protein, 11 aa, Human herpesvirus 4
LRPTAPTILSP

SEQ ID NO: 774 - protein, 11 aa, Human herpesvirus 4
RPTAPTILSPL

SEQ ID NO: 775 - protein, 11 aa, Human herpesvirus 4
PTAPTILSPLS

SEQ ID NO: 776 - protein, 12 aa, Human herpesvirus 4
QPHVPPLRPTAP

SEQ ID NO: 777 - protein, 12 aa, Human herpesvirus 4
PHVPPLRPTAPT

SEQ ID NO: 778 - protein, 12 aa, Human herpesvirus 4
HVPPLRPTAPTI

SEQ ID NO: 779 - protein, 12 aa, Human herpesvirus 4
VPPLRPTAPTIL

SEQ ID NO: 780 - protein, 12 aa, Human herpesvirus 4
PPLRPTAPTILS

SEQ ID NO: 781 - protein, 12 aa, Human herpesvirus 4
PLRPTAPTILSP

SEQ ID NO: 782 - protein, 12 aa, Human herpesvirus 4
LRPTAPTILSPL

SEQ ID NO: 783 - protein, 12 aa, Human herpesvirus 4
RPTAPTILSPLS

SEQ ID NO: 784 - protein, 12 aa, Human herpesvirus 4
PTAPTILSPLSQ

SEQ ID NO: 785 - protein, 13 aa, Human herpesvirus 4
VQPHVPPLRPTAP

SEQ ID NO: 786 - protein, 13 aa, Human herpesvirus 4
QPHVPPLRPTAPT

SEQ ID NO: 787 - protein, 13 aa, Human herpesvirus 4
PHVPPLRPTAPTI

SEQ ID NO: 788 - protein, 13 aa, Human herpesvirus 4
HVPPLRPTAPTIL

SEQ ID NO: 789 - protein, 13 aa, Human herpesvirus 4
VPPLRPTAPTILS

SEQ ID NO: 790 - protein, 13 aa, Human herpesvirus 4
PPLRPTAPTILSP

SEQ ID NO: 791 - protein, 13 aa, Human herpesvirus 4
PLRPTAPTILSPL

SEQ ID NO: 792 - protein, 13 aa, Human herpesvirus 4
LRPTAPTILSPLS

SEQ ID NO: 793 - protein, 13 aa, Human herpesvirus 4
RPTAPTILSPLSQ

SEQ ID NO: 794 - protein, 13 aa, Human herpesvirus 4
PTAPTILSPLSQP

SEQ ID NO: 795 - protein, 14 aa, Human herpesvirus 4
LVQPHVPPLRPTAP

SEQ ID NO: 796 - protein, 14 aa, Human herpesvirus 4
VQPHVPPLRPTAPT

SEQ ID NO: 797 - protein, 14 aa, Human herpesvirus 4
QPHVPPLRPTAPTI

SEQ ID NO: 798 - protein, 14 aa, Human herpesvirus 4
PHVPPLRPTAPTIL

SEQ ID NO: 799 - protein, 14 aa, Human herpesvirus 4
HVPPLRPTAPTILS

SEQ ID NO: 800 - protein, 14 aa, Human herpesvirus 4
VPPLRPTAPTILSP

SEQ ID NO: 801 - protein, 14 aa, Human herpesvirus 4
PPLRPTAPTILSPL

SEQ ID NO: 802 - protein, 14 aa, Human herpesvirus 4
PLRPTAPTILSPLS

SEQ ID NO: 803 - protein, 14 aa, Human herpesvirus 4
LRPTAPTILSPLSQ

SEQ ID NO: 804 - protein, 14 aa, Human herpesvirus 4
RPTAPTILSPLSQP

SEQ ID NO: 805 - protein, 14 aa, Human herpesvirus 4
PTAPTILSPLSQPR

SEQ ID NO: 806 - protein, 15 aa, Human herpesvirus 4
RLVQPHVPPLRPTAP

SEQ ID NO: 807 - protein, 15 aa, Human herpesvirus 4
LVQPHVPPLRPTAPT

SEQ ID NO: 808 - protein, 15 aa, Human herpesvirus 4
VQPHVPPLRPTAPTI

SEQ ID NO: 809 - protein, 15 aa, Human herpesvirus 4
QPHVPPLRPTAPTIL

SEQ ID NO: 810 - protein, 15 aa, Human herpesvirus 4
PHVPPLRPTAPTILS

SEQ ID NO: 811 - protein, 15 aa, Human herpesvirus 4
HVPPLRPTAPTILSP

SEQ ID NO: 812 - protein, 15 aa, Human herpesvirus 4
VPPLRPTAPTILSPL

SEQ ID NO: 813 - protein, 15 aa, Human herpesvirus 4
PPLRPTAPTILSPLS

SEQ ID NO: 814 - protein, 15 aa, Human herpesvirus 4
PLRPTAPTILSPLSQ

SEQ ID NO: 815 - protein, 15 aa, Human herpesvirus 4
LRPTAPTILSPLSQP

SEQ ID NO: 816 - protein, 15 aa, Human herpesvirus 4
RPTAPTILSPLSQPR

SEQ ID NO: 817 - protein, 15 aa, Human herpesvirus 4
PTAPTILSPLSQPRL

SEQ ID NO: 818 - protein, 16 aa, Human herpesvirus 4
ARLVQPHVPPLRPTAP

SEQ ID NO: 819 - protein, 16 aa, Human herpesvirus 4
RLVQPHVPPLRPTAPT

SEQ ID NO: 820 - protein, 16 aa, Human herpesvirus 4
LVQPHVPPLRPTAPTI

SEQ ID NO: 821 - protein, 16 aa, Human herpesvirus 4
VQPHVPPLRPTAPTIL

SEQ ID NO: 822 - protein, 16 aa, Human herpesvirus 4
QPHVPPLRPTAPTILS

SEQ ID NO: 823 - protein, 16 aa, Human herpesvirus 4
PHVPPLRPTAPTILSP

SEQ ID NO: 824 - protein, 16 aa, Human herpesvirus 4
HVPPLRPTAPTILSPL

SEQ ID NO: 825 - protein, 16 aa, Human herpesvirus 4
VPPLRPTAPTILSPLS

SEQ ID NO: 826 - protein, 16 aa, Human herpesvirus 4
PPLRPTAPTILSPLSQ

SEQ ID NO: 827 - protein, 16 aa, Human herpesvirus 4
PLRPTAPTILSPLSQP

SEQ ID NO: 828 - protein, 16 aa, Human herpesvirus 4
LRPTAPTILSPLSQPR

SEQ ID NO: 829 - protein, 16 aa, Human herpesvirus 4
RPTAPTILSPLSQPRL

SEQ ID NO: 830 - protein, 16 aa, Human herpesvirus 4
PTAPTILSPLSQPRLT

SEQ ID NO: 831 - protein, 17 aa, Human herpesvirus 4
QARLVQPHVPPLRPTAP

SEQ ID NO: 832 - protein, 17 aa, Human herpesvirus 4
ARLVQPHVPPLRPTAPT

SEQ ID NO: 833 - protein, 17 aa, Human herpesvirus 4
RLVQPHVPPLRPTAPTI

SEQ ID NO: 834 - protein, 17 aa, Human herpesvirus 4
LVQPHVPPLRPTAPTIL

SEQ ID NO: 835 - protein, 17 aa, Human herpesvirus 4
VQPHVPPLRPTAPTILS

SEQ ID NO: 836 - protein, 17 aa, Human herpesvirus 4
QPHVPPLRPTAPTILSP

SEQ ID NO: 837 - protein, 17 aa, Human herpesvirus 4
PHVPPLRPTAPTILSPL

SEQ ID NO: 838 - protein, 17 aa, Human herpesvirus 4
HVPPLRPTAPTILSPLS

SEQ ID NO: 839 - protein, 17 aa, Human herpesvirus 4
VPPLRPTAPTILSPLSQ

SEQ ID NO: 840 - protein, 17 aa, Human herpesvirus 4
PPLRPTAPTILSPLSQP

SEQ ID NO: 841 - protein, 17 aa, Human herpesvirus 4
PLRPTAPTILSPLSQPR

SEQ ID NO: 842 - protein, 17 aa, Human herpesvirus 4
LRPTAPTILSPLSQPRL

SEQ ID NO: 843 - protein, 17 aa, Human herpesvirus 4
RPTAPTILSPLSQPRLT

SEQ ID NO: 844 - protein, 17 aa, Human herpesvirus 4
PTAPTILSPLSQPRLTP

SEQ ID NO: 845 - protein, 17 aa, Human herpesvirus 4
PTAPTILSPLSQPRLTP

SEQ ID NO: 846 - protein, 18 aa, Human herpesvirus 4
QARLVQPHVPPLRPTAPT

SEQ ID NO: 847 - protein, 18 aa, Human herpesvirus 4
ARLVQPHVPPLRPTAPTI

SEQ ID NO: 848 - protein, 18 aa, Human herpesvirus 4
RLVQPHVPPLRPTAPTIL

SEQ ID NO: 849 - protein, 18 aa, Human herpesvirus 4
LVQPHVPPLRPTAPTILS

SEQ ID NO: 850 - protein, 18 aa, Human herpesvirus 4
VQPHVPPLRPTAPTILSP

SEQ ID NO: 851 - protein, 18 aa, Human herpesvirus 4
QPHVPPLRPTAPTILSPL

SEQ ID NO: 852 - protein, 18 aa, Human herpesvirus 4
PHVPPLRPTAPTILSPLS

SEQ ID NO: 853 - protein, 18 aa, Human herpesvirus 4
HVPPLRPTAPTILSPLSQ

SEQ ID NO: 854 - protein, 18 aa, Human herpesvirus 4
VPPLRPTAPTILSPLSQP

SEQ ID NO: 855 - protein, 18 aa, Human herpesvirus 4
PPLRPTAPTILSPLSQPR

SEQ ID NO: 856 - protein, 18 aa, Human herpesvirus 4
PLRPTAPTILSPLSQPRL

SEQ ID NO: 857 - protein, 18 aa, Human herpesvirus 4
LRPTAPTILSPLSQPRLT

SEQ ID NO: 858 - protein, 18 aa, Human herpesvirus 4
RPTAPTILSPLSQPRLTP

SEQ ID NO: 859 - protein, 18 aa, Human herpesvirus 4
PTAPTILSPLSQPRLTPP

SEQ ID NO: 860 - protein, 19 aa, Human herpesvirus 4
APQARLVQPHVPPLRPTAP

SEQ ID NO: 861 - protein, 19 aa, Human herpesvirus 4
PQARLVQPHVPPLRPTAPT

SEQ ID NO: 862 - protein, 19 aa, Human herpesvirus 4
PQARLVQPHVPPLRPTAPT

SEQ ID NO: 863 - protein, 19 aa, Human herpesvirus 4
ARLVQPHVPPLRPTAPTIL

SEQ ID NO: 864 - protein, 19 aa, Human herpesvirus 4
RLVQPHVPPLRPTAPTILS

SEQ ID NO: 865 - protein, 19 aa, Human herpesvirus 4
LVQPHVPPLRPTAPTILSP

SEQ ID NO: 866 - protein, 19 aa, Human herpesvirus 4
VQPHVPPLRPTAPTILSPL

SEQ ID NO: 867 - protein, 19 aa, Human herpesvirus 4
QPHVPPLRPTAPTILSPLS

SEQ ID NO: 868 - protein, 19 aa, Human herpesvirus 4
PHVPPLRPTAPTILSPLSQ

SEQ ID NO: 869 - protein, 19 aa, Human herpesvirus 4
HVPPLRPTAPTILSPLSQP

SEQ ID NO: 870 - protein, 19 aa, Human herpesvirus 4
VPPLRPTAPTILSPLSQPR

SEQ ID NO: 871 - protein, 19 aa, Human herpesvirus 4
PPLRPTAPTILSPLSQPRL

SEQ ID NO: 872 - protein, 19 aa, Human herpesvirus 4
PLRPTAPTILSPLSQPRLT

SEQ ID NO: 873 - protein, 19 aa, Human herpesvirus 4
LRPTAPTILSPLSQPRLTP

SEQ ID NO: 874 - protein, 19 aa, Human herpesvirus 4
RPTAPTILSPLSQPRLTPP

SEQ ID NO: 875 - protein, 19 aa, Human herpesvirus 4
PTAPTILSPLSQPRLTPPQ

SEQ ID NO: 876 - protein, 20 aa, Human herpesvirus 4
TAPQARLVQPHVPPLRPTAP

SEQ ID NO: 877 - protein, 20 aa, Human herpesvirus 4
APQARLVQPHVPPLRPTAPT

SEQ ID NO: 878 - protein, 20 aa, Human herpesvirus 4
PQARLVQPHVPPLRPTAPTI

SEQ ID NO: 879 - protein, 20 aa, Human herpesvirus 4
QARLVQPHVPPLRPTAPTIL

SEQ ID NO: 880 - protein, 20 aa, Human herpesvirus 4
ARLVQPHVPPLRPTAPTILS

SEQ ID NO: 881 - protein, 20 aa, Human herpesvirus 4
RLVQPHVPPLRPTAPTILSP

SEQ ID NO: 882 - protein, 20 aa, Human herpesvirus 4
LVQPHVPPLRPTAPTILSPL

SEQ ID NO: 883 - protein, 20 aa, Human herpesvirus 4
VQPHVPPLRPTAPTILSPLS

SEQ ID NO: 884 - protein, 20 aa, Human herpesvirus 4
QPHVPPLRPTAPTILSPLSQ

SEQ ID NO: 885 - protein, 20 aa, Human herpesvirus 4
PHVPPLRPTAPTILSPLSQP

SEQ ID NO: 886 - protein, 20 aa, Human herpesvirus 4
HVPPLRPTAPTILSPLSQPR

SEQ ID NO: 887 - protein, 20 aa, Human herpesvirus 4
VPPLRPTAPTILSPLSQPRL

SEQ ID NO: 888 - protein, 20 aa, Human herpesvirus 4
PPLRPTAPTILSPLSQPRLT

SEQ ID NO: 889 - protein, 20 aa, Human herpesvirus 4
PLRPTAPTILSPLSQPRLTP

SEQ ID NO: 890 - protein, 20 aa, Human herpesvirus 4
LRPTAPTILSPLSQPRLTPP

SEQ ID NO: 891 - protein, 20 aa, Human herpesvirus 4
RPTAPTILSPLSQPRLTPPQ

SEQ ID NO: 892 - protein, 20 aa, Human herpesvirus 4
PTAPTILSPLSQPRLTPPQP

SEQ ID NO: 893 - protein, 8 aa, Influenza A virus
IVERPSAP

SEQ ID NO: 894 - protein, 8 aa, Influenza A virus
VERPSAPE

SEQ ID NO: 895 - protein, 8 aa, Influenza A virus
ERPSAPEG

SEQ ID NO: 896 - protein, 8 aa, Influenza A virus
RPSAPEGM

SEQ ID NO: 897 - protein, 8 aa, Influenza A virus
PSAPEGMC

SEQ ID NO: 898 - protein, 9 aa, Influenza A virus
YIVERPSAP

SEQ ID NO: 899 - protein, 9 aa, Influenza A virus
IVERPSAPE

SEQ ID NO: 900 - protein, 9 aa, Influenza A virus
VERPSAPEG

SEQ ID NO: 901 - protein, 9 aa, Influenza A virus
ERPSAPEGM

SEQ ID NO: 902 - protein, 9 aa, Influenza A virus
RPSAPEGMC

SEQ ID NO: 903 - protein, 9 aa, Influenza A virus
PSAPEGMCY

SEQ ID NO: 904 - protein, 10 aa, Influenza A virus
SYIVERPSAP

SEQ ID NO: 905 - protein, 10 aa, Influenza A virus
YIVERPSAPE

SEQ ID NO: 906 - protein, 10 aa, Influenza A virus
IVERPSAPEG

SEQ ID NO: 907 - protein, 10 aa, Influenza A virus
VERPSAPEGM

SEQ ID NO: 908 - protein, 10 aa, Influenza A virus
ERPSAPEGMC

SEQ ID NO: 909 - protein, 10 aa, Influenza A virus
RPSAPEGMCY

SEQ ID NO: 910 - protein, 10 aa, Influenza A virus
PSAPEGMCYP

SEQ ID NO: 911 - protein, 11 aa, Influenza A virus
WSYIVERPSAP

SEQ ID NO: 912 - protein, 11 aa, Influenza A virus
SYIVERPSAPE

SEQ ID NO: 913 - protein, 11 aa, Influenza A virus
YIVERPSAPEG

SEQ ID NO: 914 - protein, 11 aa, Influenza A virus
IVERPSAPEGM

SEQ ID NO: 915 - protein, 11 aa, Influenza A virus
VERPSAPEGMC

SEQ ID NO: 916 - protein, 11 aa, Influenza A virus
ERPSAPEGMCY

SEQ ID NO: 917 - protein, 11 aa, Influenza A virus
RPSAPEGMCYP

SEQ ID NO: 918 - protein, 11 aa, Influenza A virus
PSAPEGMCYPG

SEQ ID NO: 919 - protein, 12 aa, Influenza A virus
GWSYIVERPSAP

SEQ ID NO: 920 - protein, 12 aa, Influenza A virus
WSYIVERPSAPE

SEQ ID NO: 921 - protein, 12 aa, Influenza A virus
SYIVERPSAPEG

SEQ ID NO: 922 - protein, 12 aa, Influenza A virus
YIVERPSAPEGM

SEQ ID NO: 923 - protein, 12 aa, Influenza A virus
IVERPSAPEGMC

SEQ ID NO: 924 - protein, 12 aa, Influenza A virus
VERPSAPEGMCY

SEQ ID NO: 925 - protein, 12 aa, Influenza A virus
ERPSAPEGMCYP

SEQ ID NO: 926 - protein, 12 aa, Influenza A virus
RPSAPEGMCYPG

SEQ ID NO: 927 - protein, 12 aa, Influenza A virus
PSAPEGMCYPGS

SEQ ID NO: 928 - protein, 13 aa, Influenza A virus
QGWSYIVERPSAP

SEQ ID NO: 929 - protein, 13 aa, Influenza A virus
GWSYIVERPSAPE

SEQ ID NO: 930 - protein, 13 aa, Influenza A virus
WSYIVERPSAPEG

SEQ ID NO: 931 - protein, 13 aa, Influenza A virus
SYIVERPSAPEGM

SEQ ID NO: 932 - protein, 13 aa, Influenza A virus
YIVERPSAPEGMC

SEQ ID NO: 933 - protein, 13 aa, Influenza A virus
IVERPSAPEGMCY

SEQ ID NO: 934 - protein, 13 aa, Influenza A virus
VERPSAPEGMCYP

SEQ ID NO: 935 - protein, 13 aa, Influenza A virus
ERPSAPEGMCYPG

SEQ ID NO: 936 - protein, 13 aa, Influenza A virus
RPSAPEGMCYPGS

SEQ ID NO: 937 - protein, 13 aa, Influenza A virus
PSAPEGMCYPGSI

SEQ ID NO: 938 - protein, 14 aa, Influenza A virus
DQGWSYIVERPSAP

SEQ ID NO: 939 - protein, 14 aa, Influenza A virus
QGWSYIVERPSAPE

SEQ ID NO: 940 - protein, 14 aa, Influenza A virus
GWSYIVERPSAPEG

SEQ ID NO: 941 - protein, 14 aa, Influenza A virus
WSYIVERPSAPEGM

SEQ ID NO: 942 - protein, 14 aa, Influenza A virus
SYIVERPSAPEGMC

SEQ ID NO: 943 - protein, 14 aa, Influenza A virus
YIVERPSAPEGMCY

SEQ ID NO: 944 - protein, 14 aa, Influenza A virus
IVERPSAPEGMCYP

SEQ ID NO: 945 - protein, 14 aa, Influenza A virus
VERPSAPEGMCYPG

SEQ ID NO: 946 - protein, 14 aa, Influenza A virus
ERPSAPEGMCYPGS

SEQ ID NO: 947 - protein, 14 aa, Influenza A virus
RPSAPEGMCYPGSI

SEQ ID NO: 948 - protein, 14 aa, Influenza A virus
PSAPEGMCYPGSIE

SEQ ID NO: 949 - protein, 15 aa, Influenza A virus
KDQGWSYIVERPSAP

SEQ ID NO: 950 - protein, 15 aa, Influenza A virus
DQGWSYIVERPSAPE

SEQ ID NO: 951 - protein, 15 aa, Influenza A virus
QGWSYIVERPSAPEG

SEQ ID NO: 952 - protein, 15 aa, Influenza A virus
GWSYIVERPSAPEGM

SEQ ID NO: 953 - protein, 15 aa, Influenza A virus
WSYIVERPSAPEGMC

SEQ ID NO: 954 - protein, 15 aa, Influenza A virus
SYIVERPSAPEGMCY

SEQ ID NO: 955 - protein, 15 aa, Influenza A virus
YIVERPSAPEGMCYP

SEQ ID NO: 956 - protein, 15 aa, Influenza A virus
IVERPSAPEGMCYPG

SEQ ID NO: 957 - protein, 15 aa, Influenza A virus
VERPSAPEGMCYPGS

SEQ ID NO: 958 - protein, 15 aa, Influenza A virus
ERPSAPEGMCYPGSI

SEQ ID NO: 959 - protein, 15 aa, Influenza A virus
RPSAPEGMCYPGSIE

SEQ ID NO: 960 - protein, 15 aa, Influenza A virus
PSAPEGMCYPGSIEN

SEQ ID NO: 961 - protein, 16 aa, Influenza A virus
LKDQGWSYIVERPSAP

SEQ ID NO: 962 - protein, 16 aa, Influenza A virus
KDQGWSYIVERPSAPE

SEQ ID NO: 963 - protein, 16 aa, Influenza A virus
DQGWSYIVERPSAPEG

SEQ ID NO: 964 - protein, 16 aa, Influenza A virus
QGWSYIVERPSAPEGM

SEQ ID NO: 965 - protein, 16 aa, Influenza A virus
GWSYIVERPSAPEGMC

SEQ ID NO: 966 - protein, 16 aa, Influenza A virus
WSYIVERPSAPEGMCY

SEQ ID NO: 967 - protein, 16 aa, Influenza A virus
SYIVERPSAPEGMCYP

SEQ ID NO: 968 - protein, 16 aa, Influenza A virus
YIVERPSAPEGMCYPG

SEQ ID NO: 969 - protein, 16 aa, Influenza A virus
IVERPSAPEGMCYPGS

SEQ ID NO: 970 - protein, 16 aa, Influenza A virus
VERPSAPEGMCYPGSI

SEQ ID NO: 971 - protein, 16 aa, Influenza A virus
ERPSAPEGMCYPGSIE

SEQ ID NO: 972 - protein, 16 aa, Influenza A virus
RPSAPEGMCYPGSIEN

SEQ ID NO: 973 - protein, 16 aa, Influenza A virus
PSAPEGMCYPGSIENL

SEQ ID NO: 974 - protein, 17 aa, Influenza A virus
HLKDQGWSYIVERPSAP

SEQ ID NO: 975 - protein, 17 aa, Influenza A virus
LKDQGWSYIVERPSAPE

SEQ ID NO: 976 - protein, 17 aa, Influenza A virus
KDQGWSYIVERPSAPEG

SEQ ID NO: 977 - protein, 17 aa, Influenza A virus
DQGWSYIVERPSAPEGM

SEQ ID NO: 978 - protein, 17 aa, Influenza A virus
QGWSYIVERPSAPEGMC

SEQ ID NO: 979 - protein, 17 aa, Influenza A virus
GWSYIVERPSAPEGMCY

SEQ ID NO: 980 - protein, 17 aa, Influenza A virus
WSYIVERPSAPEGMCYP

SEQ ID NO: 981 - protein, 17 aa, Influenza A virus
SYIVERPSAPEGMCYPG

SEQ ID NO: 982 - protein, 17 aa, Influenza A virus
YIVERPSAPEGMCYPGS

SEQ ID NO: 983 - protein, 17 aa, Influenza A virus
IVERPSAPEGMCYPGSI

SEQ ID NO: 984 - protein, 17 aa, Influenza A virus
VERPSAPEGMCYPGSIE

SEQ ID NO: 985 - protein, 17 aa, Influenza A virus
ERPSAPEGMCYPGSIEN

SEQ ID NO: 986 - protein, 17 aa, Influenza A virus
RPSAPEGMCYPGSIENL

SEQ ID NO: 987 - protein, 17 aa, Influenza A virus
PSAPEGMCYPGSIENLE

SEQ ID NO: 988 - protein, 18 aa, Influenza A virus
IHLKDQGWSYIVERPSAP

SEQ ID NO: 989 - protein, 18 aa, Influenza A virus
HLKDQGWSYIVERPSAPE

SEQ ID NO: 990 - protein, 18 aa, Influenza A virus
LKDQGWSYIVERPSAPEG

SEQ ID NO: 991 - protein, 18 aa, Influenza A virus
KDQGWSYIVERPSAPEGM

SEQ ID NO: 992 - protein, 18 aa, Influenza A virus
DQGWSYIVERPSAPEGMC

SEQ ID NO: 993 - protein, 18 aa, Influenza A virus
QGWSYIVERPSAPEGMCY

SEQ ID NO: 994 - protein, 18 aa, Influenza A virus
GWSYIVERPSAPEGMCYP

SEQ ID NO: 995 - protein, 18 aa, Influenza A virus
WSYIVERPSAPEGMCYPG

SEQ ID NO: 996 - protein, 18 aa, Influenza A virus
SYIVERPSAPEGMCYPGS

SEQ ID NO: 997 - protein, 18 aa, Influenza A virus
YIVERPSAPEGMCYPGSI

SEQ ID NO: 998 - protein, 18 aa, Influenza A virus
IVERPSAPEGMCYPGSIE

SEQ ID NO: 999 - protein, 18 aa, Influenza A virus
VERPSAPEGMCYPGSIEN

SEQ ID NO: 1000 - protein, 18 aa, Influenza A virus
ERPSAPEGMCYPGSIENL

SEQ ID NO: 1001 - protein, 18 aa, Influenza A virus
RPSAPEGMCYPGSIENLE

SEQ ID NO: 1002 - protein, 18 aa, Influenza A virus
PSAPEGMCYPGSIENLEE

SEQ ID NO: 1003 - protein, 19 aa, Influenza A virus
DIHLKDQGWSYIVERPSAP

SEQ ID NO: 1004 - protein, 19 aa, Influenza A virus
IHLKDQGWSYIVERPSAPE

SEQ ID NO: 1005 - protein, 19 aa, Influenza A virus
HLKDQGWSYIVERPSAPEG

SEQ ID NO: 1006 - protein, 19 aa, Influenza A virus
LKDQGWSYIVERPSAPEGM

SEQ ID NO: 1007 - protein, 19 aa, Influenza A virus
KDQGWSYIVERPSAPEGMC

SEQ ID NO: 1008 - protein, 19 aa, Influenza A virus
DQGWSYIVERPSAPEGMCY

SEQ ID NO: 1009 - protein, 19 aa, Influenza A virus
QGWSYIVERPSAPEGMCYP

SEQ ID NO: 1010 - protein, 19 aa, Influenza A virus
GWSYIVERPSAPEGMCYPG

SEQ ID NO: 1011 - protein, 19 aa, Influenza A virus
WSYIVERPSAPEGMCYPGS

SEQ ID NO: 1012 - protein, 19 aa, Influenza A virus
SYIVERPSAPEGMCYPGSI

SEQ ID NO: 1013 - protein, 19 aa, Influenza A virus
YIVERPSAPEGMCYPGSIE

SEQ ID NO: 1014 - protein, 19 aa, Influenza A virus
IVERPSAPEGMCYPGSIEN

SEQ ID NO: 1015 - protein, 19 aa, Influenza A virus
VERPSAPEGMCYPGSIENL

SEQ ID NO: 1016 - protein, 19 aa, Influenza A virus
ERPSAPEGMCYPGSIENLE

SEQ ID NO: 1017 - protein, 19 aa, Influenza A virus
RPSAPEGMCYPGSIENLEE

SEQ ID NO: 1018 - protein, 19 aa, Influenza A virus
PSAPEGMCYPGSIENLEEL

SEQ ID NO: 1019 - protein, 20 aa, Influenza A virus
CDIHLKDQGWSYIVERPSAP

SEQ ID NO: 1020 - protein, 20 aa, Influenza A virus
DIHLKDQGWSYIVERPSAPE

SEQ ID NO: 1021 - protein, 20 aa, Influenza A virus
IHLKDQGWSYIVERPSAPEG

SEQ ID NO: 1022 - protein, 20 aa, Influenza A virus
HLKDQGWSYIVERPSAPEGM

SEQ ID NO: 1023 - protein, 20 aa, Influenza A virus
LKDQGWSYIVERPSAPEGMC

SEQ ID NO: 1024 - protein, 20 aa, Influenza A virus
KDQGWSYIVERPSAPEGMCY

SEQ ID NO: 1025 - protein, 20 aa, Influenza A virus
DQGWSYIVERPSAPEGMCYP

SEQ ID NO: 1026 - protein, 20 aa, Influenza A virus
QGWSYIVERPSAPEGMCYPG

SEQ ID NO: 1027 - protein, 20 aa, Influenza A virus
GWSYIVERPSAPEGMCYPGS

SEQ ID NO: 1028 - protein, 20 aa, Influenza A virus
WSYIVERPSAPEGMCYPGSI

SEQ ID NO: 1029 - protein, 20 aa, Influenza A virus
SYIVERPSAPEGMCYPGSIE

SEQ ID NO: 1030 - protein, 20 aa, Influenza A virus
YIVERPSAPEGMCYPGSIEN

SEQ ID NO: 1031 - protein, 20 aa, Influenza A virus
IVERPSAPEGMCYPGSIENL

SEQ ID NO: 1032 - protein, 20 aa, Influenza A virus
VERPSAPEGMCYPGSIENLE

SEQ ID NO: 1033 - protein, 20 aa, Influenza A virus
ERPSAPEGMCYPGSIENLEE

SEQ ID NO: 1034 - protein, 20 aa, Influenza A virus
RPSAPEGMCYPGSIENLEEL

SEQ ID NO: 1035 - protein, 20 aa, Influenza A virus
PSAPEGMCYPGSIENLEELR

SEQ ID NO: 1036 - protein, 8 aa, Human papillomavirus
CQKGPSAP

SEQ ID NO: 1037 - protein, 8 aa, Human papillomavirus
QKGPSAPA

SEQ ID NO: 1038 - protein, 8 aa, Human papillomavirus
KGPSAPAP

SEQ ID NO: 1039 - protein, 8 aa, Human papillomavirus
GPSAPAPK

SEQ ID NO: 1040 - protein, 8 aa, Human papillomavirus
PSAPAPKK

SEQ ID NO: 1041 - protein, 9 aa, Human papillomavirus
TCQKGPSAP

SEQ ID NO: 1042 - protein, 9 aa, Human papillomavirus
CQKGPSAPA

SEQ ID NO: 1043 - protein, 9 aa, Human papillomavirus
QKGPSAPAP

SEQ ID NO: 1044 - protein, 9 aa, Human papillomavirus
KGPSAPAPK

SEQ ID NO: 1045 - protein, 9 aa, Human papillomavirus
GPSAPAPKK

SEQ ID NO: 1046 - protein, 9 aa, Human papillomavirus
PSAPAPKKD

SEQ ID NO: 1047 - protein, 10 aa, Human papillomavirus
ITCQKGPSAP

SEQ ID NO: 1048 - protein, 10 aa, Human papillomavirus
TCQKGPSAPA

SEQ ID NO: 1049 - protein, 10 aa, Human papillomavirus
CQKGPSAPAP

SEQ ID NO: 1050 - protein, 10 aa, Human papillomavirus
QKGPSAPAPK

SEQ ID NO: 1051 - protein, 10 aa, Human papillomavirus
KGPSAPAPKK

SEQ ID NO: 1052 - protein, 10 aa, Human papillomavirus
GPSAPAPKKD

SEQ ID NO: 1053 - protein, 10 aa, Human papillomavirus
PSAPAPKKDP

SEQ ID NO: 1054 - protein, 11 aa, Human papillomavirus
AITCQKGPSAP

SEQ ID NO: 1055 - protein, 11 aa, Human papillomavirus
ITCQKGPSAPA

SEQ ID NO: 1056 - protein, 11 aa, Human papillomavirus
TCQKGPSAPAP

SEQ ID NO: 1057 - protein, 11 aa, Human papillomavirus
CQKGPSAPAPK

SEQ ID NO: 1058 - protein, 11 aa, Human papillomavirus
QKGPSAPAPKK

SEQ ID NO: 1059 - protein, 11 aa, Human papillomavirus
KGPSAPAPKKD

SEQ ID NO: 1060 - protein, 11 aa, Human papillomavirus
GPSAPAPKKDP

SEQ ID NO: 1061 - protein, 11 aa, Human papillomavirus
PSAPAPKKDPY

SEQ ID NO: 1062 - protein, 12 aa, Human papillomavirus
RAITCQKGPSAP

SEQ ID NO: 1063 - protein, 12 aa, Human papillomavirus
AITCQKGPSAPA

SEQ ID NO: 1064 - protein, 12 aa, Human papillomavirus
ITCQKGPSAPAP

SEQ ID NO: 1065 - protein, 12 aa, Human papillomavirus
TCQKGPSAPAPK

SEQ ID NO: 1066 - protein, 12 aa, Human papillomavirus
CQKGPSAPAPKK

SEQ ID NO: 1067 - protein, 12 aa, Human papillomavirus
QKGPSAPAPKKD

SEQ ID NO: 1068 - protein, 12 aa, Human papillomavirus
KGPSAPAPKKDP

SEQ ID NO: 1069 - protein, 12 aa, Human papillomavirus
GPSAPAPKKDPY

SEQ ID NO: 1070 - protein, 12 aa, Human papillomavirus
PSAPAPKKDPYD

SEQ ID NO: 1071 - protein, 13 aa, Human papillomavirus
SRAITCQKGPSAP

SEQ ID NO: 1072 - protein, 13 aa, Human papillomavirus
RAITCQKGPSAPA

SEQ ID NO: 1073 - protein, 13 aa, Human papillomavirus
AITCQKGPSAPAP

SEQ ID NO: 1074 - protein, 13 aa, Human papillomavirus
ITCQKGPSAPAPK

SEQ ID NO: 1075 - protein, 13 aa, Human papillomavirus
TCQKGPSAPAPKK

SEQ ID NO: 1076 - protein, 13 aa, Human papillomavirus
CQKGPSAPAPKKD

SEQ ID NO: 1077 - protein, 13 aa, Human papillomavirus
QKGPSAPAPKKDP

SEQ ID NO: 1078 - protein, 13 aa, Human papillomavirus
KGPSAPAPKKDPY

SEQ ID NO: 1079 - protein, 13 aa, Human papillomavirus
GPSAPAPKKDPYD

SEQ ID NO: 1080 - protein, 13 aa, Human papillomavirus
PSAPAPKKDPYDG

SEQ ID NO: 1081 - protein, 14 aa, Human papillomavirus
QSRAITCQKGPSAP

SEQ ID NO: 1082 - protein, 14 aa, Human papillomavirus
SRAITCQKGPSAPA

SEQ ID NO: 1083 - protein, 14 aa, Human papillomavirus
RAITCQKGPSAPAP

SEQ ID NO: 1084 - protein, 14 aa, Human papillomavirus
AITCQKGPSAPAPK

SEQ ID NO: 1085 - protein, 14 aa, Human papillomavirus
ITCQKGPSAPAPKK

SEQ ID NO: 1086 - protein, 14 aa, Human papillomavirus
TCQKGPSAPAPKKD

SEQ ID NO: 1087 - protein, 14 aa, Human papillomavirus
CQKGPSAPAPKKDP

SEQ ID NO: 1088 - protein, 14 aa, Human papillomavirus
QKGPSAPAPKKDPY

SEQ ID NO: 1089 - protein, 14 aa, Human papillomavirus
KGPSAPAPKKDPYD

SEQ ID NO: 1090 - protein, 14 aa, Human papillomavirus
GPSAPAPKKDPYDG

SEQ ID NO: 1091 - protein, 14 aa, Human papillomavirus
PSAPAPKKDPYDGL

SEQ ID NO: 1092 - protein, 15 aa, Human papillomavirus
LQSRAITCQKGPSAP

SEQ ID NO: 1093 - protein, 15 aa, Human papillomavirus
QSRAITCQKGPSAPA

SEQ ID NO: 1094 - protein, 15 aa, Human papillomavirus
SRAITCQKGPSAPAP

SEQ ID NO: 1095 - protein, 15 aa, Human papillomavirus
RAITCQKGPSAPAPK

SEQ ID NO: 1096 - protein, 15 aa, Human papillomavirus
AITCQKGPSAPAPKK

SEQ ID NO: 1097 - protein, 15 aa, Human papillomavirus
ITCQKGPSAPAPKKD

SEQ ID NO: 1098 - protein, 15 aa, Human papillomavirus
TCQKGPSAPAPKKDP

SEQ ID NO: 1099 - protein, 15 aa, Human papillomavirus
CQKGPSAPAPKKDPY

SEQ ID NO: 1100 - protein, 15 aa, Human papillomavirus
QKGPSAPAPKKDPYD

SEQ ID NO: 1101 - protein, 15 aa, Human papillomavirus
KGPSAPAPKKDPYDG

SEQ ID NO: 1102 - protein, 15 aa, Human papillomavirus
GPSAPAPKKDPYDGL

SEQ ID NO: 1103 - protein, 15 aa, Human papillomavirus
PSAPAPKKDPYDGLV

SEQ ID NO: 1104 - protein, 16 aa, Human papillomavirus
YLQSRAITCQKGPSAP

SEQ ID NO: 1105 - protein, 16 aa, Human papillomavirus
LQSRAITCQKGPSAPA

SEQ ID NO: 1106 - protein, 16 aa, Human papillomavirus
QSRAITCQKGPSAPAP

SEQ ID NO: 1107 - protein, 16 aa, Human papillomavirus
SRAITCQKGPSAPAPK

SEQ ID NO: 1108 - protein, 16 aa, Human papillomavirus
RAITCQKGPSAPAPKK

SEQ ID NO: 1109 - protein, 16 aa, Human papillomavirus
AITCQKGPSAPAPKKD

SEQ ID NO: 1110 - protein, 16 aa, Human papillomavirus
ITCQKGPSAPAPKKDP

SEQ ID NO: 1111 - protein, 16 aa, Human papillomavirus
TCQKGPSAPAPKKDPY

SEQ ID NO: 1112 - protein, 16 aa, Human papillomavirus
CQKGPSAPAPKKDPYD

SEQ ID NO: 1113 - protein, 16 aa, Human papillomavirus
QKGPSAPAPKKDPYDG

SEQ ID NO: 1114 - protein, 16 aa, Human papillomavirus
KGPSAPAPKKDPYDGL

SEQ ID NO: 1115 - protein, 16 aa, Human papillomavirus
GPSAPAPKKDPYDGLV

SEQ ID NO: 1116 - protein, 16 aa, Human papillomavirus
PSAPAPKKDPYDGLVF

SEQ ID NO: 1117 - protein, 17 aa, Human papillomavirus
RYLQSRAITCQKGPSAP

SEQ ID NO: 1118 - protein, 17 aa, Human papillomavirus
YLQSRAITCQKGPSAPA

SEQ ID NO: 1119 - protein, 17 aa, Human papillomavirus
LQSRAITCQKGPSAPAP

SEQ ID NO: 1120 - protein, 17 aa, Human papillomavirus
QSRAITCQKGPSAPAPK

SEQ ID NO: 1121 - protein, 17 aa, Human papillomavirus
SRAITCQKGPSAPAPKK

SEQ ID NO: 1122 - protein, 17 aa, Human papillomavirus
RAITCQKGPSAPAPKKD

SEQ ID NO: 1123 - protein, 17 aa, Human papillomavirus
AITCQKGPSAPAPKKDP

SEQ ID NO: 1124 - protein, 17 aa, Human papillomavirus
ITCQKGPSAPAPKKDPY

SEQ ID NO: 1125 - protein, 17 aa, Human papillomavirus
TCQKGPSAPAPKKDPYD

SEQ ID NO: 1126 - protein, 17 aa, Human papillomavirus
CQKGPSAPAPKKDPYDG

SEQ ID NO: 1127 - protein, 17 aa, Human papillomavirus
QKGPSAPAPKKDPYDGL

SEQ ID NO: 1128 - protein, 17 aa, Human papillomavirus
KGPSAPAPKKDPYDGLV

SEQ ID NO: 1129 - protein, 17 aa, Human papillomavirus
GPSAPAPKKDPYDGLVF

SEQ ID NO: 1130 - protein, 17 aa, Human papillomavirus
PSAPAPKKDPYDGLVFW

SEQ ID NO: 1131 - protein, 18 aa, Human papillomavirus
YRYLQSRAITCQKGPSAP

SEQ ID NO: 1132 - protein, 18 aa, Human papillomavirus
RYLQSRAITCQKGPSAPA

SEQ ID NO: 1133 - protein, 18 aa, Human papillomavirus
YLQSRAITCQKGPSAPAP

SEQ ID NO: 1134 - protein, 18 aa, Human papillomavirus
LQSRAITCQKGPSAPAPK

SEQ ID NO: 1135 - protein, 18 aa, Human papillomavirus
QSRAITCQKGPSAPAPKK

SEQ ID NO: 1136 - protein, 18 aa, Human papillomavirus
SRAITCQKGPSAPAPKKD

SEQ ID NO: 1137 - protein, 18 aa, Human papillomavirus
RAITCQKGPSAPAPKKDP

SEQ ID NO: 1138 - protein, 18 aa, Human papillomavirus
AITCQKGPSAPAPKKDPY

SEQ ID NO: 1139 - protein, 18 aa, Human papillomavirus
ITCQKGPSAPAPKKDPYD

SEQ ID NO: 1140 - protein, 18 aa, Human papillomavirus
TCQKGPSAPAPKKDPYDG

SEQ ID NO: 1141 - protein, 18 aa, Human papillomavirus
CQKGPSAPAPKKDPYDGL

SEQ ID NO: 1142 - protein, 18 aa, Human papillomavirus
QKGPSAPAPKKDPYDGLV

SEQ ID NO: 1143 - protein, 18 aa, Human papillomavirus
KGPSAPAPKKDPYDGLVF

SEQ ID NO: 1144 - protein, 18 aa, Human papillomavirus
GPSAPAPKKDPYDGLVFW

SEQ ID NO: 1145 - protein, 18 aa, Human papillomavirus
PSAPAPKKDPYDGLVFWE

SEQ ID NO: 1146 - protein, 19 aa, Human papillomavirus
TYRYLQSRAITCQKGPSAP

SEQ ID NO: 1147 - protein, 19 aa, Human papillomavirus
YRYLQSRAITCQKGPSAPA

SEQ ID NO: 1148 - protein, 19 aa, Human papillomavirus
RYLQSRAITCQKGPSAPAP

SEQ ID NO: 1149 - protein, 19 aa, Human papillomavirus
YLQSRAITCQKGPSAPAPK

SEQ ID NO: 1150 - protein, 19 aa, Human papillomavirus
LQSRAITCQKGPSAPAPKK

SEQ ID NO: 1151 - protein, 19 aa, Human papillomavirus
QSRAITCQKGPSAPAPKKD

SEQ ID NO: 1152 - protein, 19 aa, Human papillomavirus
SRAITCQKGPSAPAPKKDP

SEQ ID NO: 1153 - protein, 19 aa, Human papillomavirus
RAITCQKGPSAPAPKKDPY

SEQ ID NO: 1154 - protein, 19 aa, Human papillomavirus
AITCQKGPSAPAPKKDPYD

SEQ ID NO: 1155 - protein, 19 aa, Human papillomavirus
ITCQKGPSAPAPKKDPYDG

SEQ ID NO: 1156 - protein, 19 aa, Human papillomavirus
TCQKGPSAPAPKKDPYDGL

SEQ ID NO: 1157 - protein, 19 aa, Human papillomavirus
CQKGPSAPAPKKDPYDGLV

SEQ ID NO: 1158 - protein, 19 aa, Human papillomavirus
QKGPSAPAPKKDPYDGLVF

SEQ ID NO: 1159 - protein, 19 aa, Human papillomavirus
KGPSAPAPKKDPYDGLVFW

SEQ ID NO: 1160 - protein, 19 aa, Human papillomavirus
GPSAPAPKKDPYDGLVFWE

SEQ ID NO: 1161 - protein, 19 aa, Human papillomavirus
PSAPAPKKDPYDGLVFWEV

SEQ ID NO: 1162 - protein, 20 aa, Human papillomavirus
DTYRYLQSRAITCQKGPSAP

SEQ ID NO: 1163 - protein, 20 aa, Human papillomavirus
TYRYLQSRAITCQKGPSAPA

SEQ ID NO: 1164 - protein, 20 aa, Human papillomavirus
YRYLQSRAITCQKGPSAPAP

SEQ ID NO: 1165 - protein, 20 aa, Human papillomavirus
RYLQSRAITCQKGPSAPAPK

SEQ ID NO: 1166 - protein, 20 aa, Human papillomavirus
YLQSRAITCQKGPSAPAPKK

SEQ ID NO: 1167 - protein, 20 aa, Human papillomavirus
LQSRAITCQKGPSAPAPKKD

SEQ ID NO: 1168 - protein, 20 aa, Human papillomavirus
QSRAITCQKGPSAPAPKKDP

SEQ ID NO: 1169 - protein, 20 aa, Human papillomavirus
SRAITCQKGPSAPAPKKDPY

SEQ ID NO: 1170 - protein, 20 aa, Human papillomavirus
RAITCQKGPSAPAPKKDPYD

SEQ ID NO: 1171 - protein, 20 aa, Human papillomavirus
AITCQKGPSAPAPKKDPYDG

SEQ ID NO: 1172 - protein, 20 aa, Human papillomavirus
ITCQKGPSAPAPKKDPYDGL

SEQ ID NO: 1173 - protein, 20 aa, Human papillomavirus
TCQKGPSAPAPKKDPYDGLV

SEQ ID NO: 1174 - protein, 20 aa, Human papillomavirus
CQKGPSAPAPKKDPYDGLVF

SEQ ID NO: 1175 - protein, 20 aa, Human papillomavirus
QKGPSAPAPKKDPYDGLVFW

SEQ ID NO: 1176 - protein, 20 aa, Human papillomavirus
KGPSAPAPKKDPYDGLVFWE

SEQ ID NO: 1177 - protein, 20 aa, Human papillomavirus
GPSAPAPKKDPYDGLVFWEV

SEQ ID NO: 1178 - protein, 20 aa, Human papillomavirus
PSAPAPKKDPYDGLVFWEVD

SEQ ID NO: 1179 - protein, 8 aa, Human papillomavirus
IFPLPSAP

SEQ ID NO: 1180 - protein, 8 aa, Human papillomavirus
FPLPSAPA

SEQ ID NO: 1181 - protein, 8 aa, Human papillomavirus
PLPSAPAV

SEQ ID NO: 1182 - protein, 8 aa, Human papillomavirus
LPSAPAVV

SEQ ID NO: 1183 - protein, 8 aa, Human papillomavirus
PSAPAVVI

SEQ ID NO: 1184 - protein, 9 aa, Human papillomavirus
IIFPLPSAP

SEQ ID NO: 1185 - protein, 9 aa, Human papillomavirus
IFPLPSAPA

SEQ ID NO: 1186 - protein, 9 aa, Human papillomavirus
FPLPSAPAV

SEQ ID NO: 1187 - protein, 9 aa, Human papillomavirus
PLPSAPAVV

SEQ ID NO: 1188 - protein, 9 aa, Human papillomavirus
LPSAPAVVI

SEQ ID NO: 1189 - protein, 9 aa, Human papillomavirus
PSAPAVVIH

SEQ ID NO: 1190 - protein, 10 aa, Human papillomavirus
TIIFPLPSAP

SEQ ID NO: 1191 - protein, 10 aa, Human papillomavirus
IIFPLPSAPA

SEQ ID NO: 1192 - protein, 10 aa, Human papillomavirus
IFPLPSAPAV

SEQ ID NO: 1193 - protein, 10 aa, Human papillomavirus
FPLPSAPAVV

SEQ ID NO: 1194 - protein, 10 aa, Human papillomavirus
PLPSAPAVVI

SEQ ID NO: 1195 - protein, 10 aa, Human papillomavirus
LPSAPAVVIH

SEQ ID NO: 1196 - protein, 10 aa, Human papillomavirus
PSAPAVVIHT

SEQ ID NO: 1197 - protein, 11 aa, Human papillomavirus
PTIIFPLPSAP

SEQ ID NO: 1198 - protein, 11 aa, Human papillomavirus
TIIFPLPSAPA

SEQ ID NO: 1199 - protein, 11 aa, Human papillomavirus
IIFPLPSAPAV

SEQ ID NO: 1200 - protein, 11 aa, Human papillomavirus
IFPLPSAPAVV

SEQ ID NO: 1201 - protein, 11 aa, Human papillomavirus
FPLPSAPAVVI

SEQ ID NO: 1202 - protein, 11 aa, Human papillomavirus
PLPSAPAVVIH

SEQ ID NO: 1203 - protein, 11 aa, Human papillomavirus
LPSAPAVVIHT

SEQ ID NO: 1204 - protein, 11 aa, Human papillomavirus
PSAPAVVIHTL

SEQ ID NO: 1205 - protein, 12 aa, Human papillomavirus
RPTIIFPLPSAP

SEQ ID NO: 1206 - protein, 12 aa, Human papillomavirus
PTIIFPLPSAPA

SEQ ID NO: 1207 - protein, 12 aa, Human papillomavirus
TIIFPLPSAPAV

SEQ ID NO: 1208 - protein, 12 aa, Human papillomavirus
IIFPLPSAPAVV

SEQ ID NO: 1209 - protein, 12 aa, Human papillomavirus
IFPLPSAPAVVI

SEQ ID NO: 1210 - protein, 12 aa, Human papillomavirus
FPLPSAPAVVIH

SEQ ID NO: 1211 - protein, 12 aa, Human papillomavirus
PLPSAPAVVIHT

SEQ ID NO: 1212 - protein, 12 aa, Human papillomavirus
LPSAPAVVIHTL

SEQ ID NO: 1213 - protein, 12 aa, Human papillomavirus
PSAPAVVIHTLD

SEQ ID NO: 1214 - protein, 13 aa, Human papillomavirus
ERPTIIFPLPSAP

SEQ ID NO: 1215 - protein, 13 aa, Human papillomavirus
RPTIIFPLPSAPA

SEQ ID NO: 1216 - protein, 13 aa, Human papillomavirus
PTIIFPLPSAPAV

SEQ ID NO: 1217 - protein, 13 aa, Human papillomavirus
TIIFPLPSAPAVV

SEQ ID NO: 1218 - protein, 13 aa, Human papillomavirus
IIFPLPSAPAVVI

SEQ ID NO: 1219 - protein, 13 aa, Human papillomavirus
IFPLPSAPAVVIH

SEQ ID NO: 1220 - protein, 13 aa, Human papillomavirus
FPLPSAPAVVIHT

SEQ ID NO: 1221 - protein, 13 aa, Human papillomavirus
PLPSAPAVVIHTL

SEQ ID NO: 1222 - protein, 13 aa, Human papillomavirus
LPSAPAVVIHTLD

SEQ ID NO: 1223 - protein, 13 aa, Human papillomavirus
PSAPAVVIHTLDK

SEQ ID NO: 1224 - protein, 14 aa, Human papillomavirus
TERPTIIFPLPSAP

SEQ ID NO: 1225 - protein, 14 aa, Human papillomavirus
ERPTIIFPLPSAPA

SEQ ID NO: 1226 - protein, 14 aa, Human papillomavirus
RPTIIFPLPSAPAV

SEQ ID NO: 1227 - protein, 14 aa, Human papillomavirus
PTIIFPLPSAPAVV

SEQ ID NO: 1228 - protein, 14 aa, Human papillomavirus
TIIFPLPSAPAVVI

SEQ ID NO: 1229 - protein, 14 aa, Human papillomavirus
IIFPLPSAPAVVIH

SEQ ID NO: 1230 - protein, 14 aa, Human papillomavirus
IFPLPSAPAVVIHT

SEQ ID NO: 1231 - protein, 14 aa, Human papillomavirus
FPLPSAPAVVIHTL

SEQ ID NO: 1232 - protein, 14 aa, Human papillomavirus
PLPSAPAVVIHTLD

SEQ ID NO: 1233 - protein, 14 aa, Human papillomavirus
LPSAPAVVIHTLDK

SEQ ID NO: 1234 - protein, 14 aa, Human papillomavirus
PSAPAVVIHTLDKS

SEQ ID NO: 1235 - protein, 15 aa, Human papillomavirus
PTERPTIIFPLPSAP

SEQ ID NO: 1236 - protein, 15 aa, Human papillomavirus
TERPTIIFPLPSAPA

SEQ ID NO: 1237 - protein, 15 aa, Human papillomavirus
ERPTIIFPLPSAPAV

SEQ ID NO: 1238 - protein, 15 aa, Human papillomavirus
RPTIIFPLPSAPAVV

SEQ ID NO: 1239 - protein, 15 aa, Human papillomavirus
PTIIFPLPSAPAVVI

SEQ ID NO: 1240 - protein, 15 aa, Human papillomavirus
TIIFPLPSAPAVVIH

SEQ ID NO: 1241 - protein, 15 aa, Human papillomavirus
IIFPLPSAPAVVIHT

SEQ ID NO: 1242 - protein, 15 aa, Human papillomavirus
IFPLPSAPAVVIHTL

SEQ ID NO: 1243 - protein, 15 aa, Human papillomavirus
FPLPSAPAVVIHTLD

SEQ ID NO: 1244 - protein, 15 aa, Human papillomavirus
PLPSAPAVVIHTLDK

SEQ ID NO: 1245 - protein, 15 aa, Human papillomavirus
LPSAPAVVIHTLDKS

SEQ ID NO: 1246 - protein, 15 aa, Human papillomavirus
PSAPAVVIHTLDKSF

SEQ ID NO: 1247 - protein, 16 aa, Human papillomavirus
GPTERPTIIFPLPSAP

SEQ ID NO: 1248 - protein, 16 aa, Human papillomavirus
PTERPTIIFPLPSAPA

SEQ ID NO: 1249 - protein, 16 aa, Human papillomavirus
TERPTIIFPLPSAPAV

SEQ ID NO: 1250 - protein, 16 aa, Human papillomavirus
ERPTIIFPLPSAPAVV

SEQ ID NO: 1251 - protein, 16 aa, Human papillomavirus
RPTIIFPLPSAPAVVI

SEQ ID NO: 1252 - protein, 16 aa, Human papillomavirus
PTIIFPLPSAPAVVIH

SEQ ID NO: 1253 - protein, 16 aa, Human papillomavirus
TIIFPLPSAPAVVIHT

SEQ ID NO: 1254 - protein, 16 aa, Human papillomavirus
IIFPLPSAPAVVIHTL

SEQ ID NO: 1255 - protein, 16 aa, Human papillomavirus
IFPLPSAPAVVIHTLD

SEQ ID NO: 1256 - protein, 16 aa, Human papillomavirus
FPLPSAPAVVIHTLDK

SEQ ID NO: 1257 - protein, 16 aa, Human papillomavirus
PLPSAPAVVIHTLDKS

SEQ ID NO: 1258 - protein, 16 aa, Human papillomavirus
LPSAPAVVIHTLDKSF

SEQ ID NO: 1259 - protein, 16 aa, Human papillomavirus
PSAPAVVIHTLDKSFD

SEQ ID NO: 1260 - protein, 17 aa, Human papillomavirus
PGPTERPTIIFPLPSAP

SEQ ID NO: 1261 - protein, 17 aa, Human papillomavirus
GPTERPTIIFPLPSAPA

SEQ ID NO: 1262 - protein, 17 aa, Human papillomavirus
PTERPTIIFPLPSAPAV

SEQ ID NO: 1263 - protein, 17 aa, Human papillomavirus
TERPTIIFPLPSAPAVV

SEQ ID NO: 1264 - protein, 17 aa, Human papillomavirus
ERPTIIFPLPSAPAVVI

SEQ ID NO: 1265 - protein, 17 aa, Human papillomavirus
RPTIIFPLPSAPAVVIH

SEQ ID NO: 1266 - protein, 17 aa, Human papillomavirus
PTIIFPLPSAPAVVIHT

SEQ ID NO: 1267 - protein, 17 aa, Human papillomavirus
TIIFPLPSAPAVVIHTL

SEQ ID NO: 1268 - protein, 17 aa, Human papillomavirus
IIFPLPSAPAVVIHTLD

SEQ ID NO: 1269 - protein, 17 aa, Human papillomavirus
IFPLPSAPAVVIHTLDK

SEQ ID NO: 1270 - protein, 17 aa, Human papillomavirus
FPLPSAPAVVIHTLDKS

SEQ ID NO: 1271 - protein, 17 aa, Human papillomavirus
PLPSAPAVVIHTLDKSF

SEQ ID NO: 1272 - protein, 17 aa, Human papillomavirus
LPSAPAVVIHTLDKSFD

SEQ ID NO: 1273 - protein, 17 aa, Human papillomavirus
PSAPAVVIHTLDKSFDY

SEQ ID NO: 1274 - protein, 18 aa, Human papillomavirus
YPGPTERPTIIFPLPSAP

SEQ ID NO: 1275 - protein, 18 aa, Human papillomavirus
PGPTERPTIIFPLPSAPA

SEQ ID NO: 1276 - protein, 18 aa, Human papillomavirus
GPTERPTIIFPLPSAPAV

SEQ ID NO: 1277 - protein, 18 aa, Human papillomavirus
PTERPTIIFPLPSAPAVV

SEQ ID NO: 1278 - protein, 18 aa, Human papillomavirus
TERPTIIFPLPSAPAVVI

SEQ ID NO: 1279 - protein, 18 aa, Human papillomavirus
ERPTIIFPLPSAPAVVIH

SEQ ID NO: 1280 - protein, 18 aa, Human papillomavirus
RPTIIFPLPSAPAVVIHT

SEQ ID NO: 1281 - protein, 18 aa, Human papillomavirus
PTIIFPLPSAPAVVIHTL

SEQ ID NO: 1282 - protein, 18 aa, Human papillomavirus
TIIFPLPSAPAVVIHTLD

SEQ ID NO: 1283 - protein, 18 aa, Human papillomavirus
IIFPLPSAPAVVIHTLDK

SEQ ID NO: 1284 - protein, 18 aa, Human papillomavirus
IFPLPSAPAVVIHTLDKS

SEQ ID NO: 1285 - protein, 18 aa, Human papillomavirus
FPLPSAPAVVIHTLDKSF

SEQ ID NO: 1286 - protein, 18 aa, Human papillomavirus
PLPSAPAVVIHTLDKSFD

SEQ ID NO: 1287 - protein, 18 aa, Human papillomavirus
LPSAPAVVIHTLDKSFDY

SEQ ID NO: 1288 - protein, 18 aa, Human papillomavirus
PSAPAVVIHTLDKSFDYY

SEQ ID NO: 1289 - protein, 19 aa, Human papillomavirus
IYPGPTERPTIIFPLPSAP

SEQ ID NO: 1290 - protein, 19 aa, Human papillomavirus
YPGPTERPTIIFPLPSAPA

SEQ ID NO: 1291 - protein, 19 aa, Human papillomavirus
PGPTERPTIIFPLPSAPAV

SEQ ID NO: 1292 - protein, 19 aa, Human papillomavirus
GPTERPTIIFPLPSAPAVV

SEQ ID NO: 1293 - protein, 19 aa, Human papillomavirus
PTERPTIIFPLPSAPAVVI

SEQ ID NO: 1294 - protein, 19 aa, Human papillomavirus
TERPTIIFPLPSAPAVVIH

SEQ ID NO: 1295 - protein, 19 aa, Human papillomavirus
ERPTIIFPLPSAPAVVIHT

SEQ ID NO: 1296 - protein, 19 aa, Human papillomavirus
RPTIIFPLPSAPAVVIHTL

SEQ ID NO: 1297 - protein, 19 aa, Human papillomavirus
PTIIFPLPSAPAVVIHTLD

SEQ ID NO: 1298 - protein, 19 aa, Human papillomavirus
TIIFPLPSAPAVVIHTLDK

SEQ ID NO: 1299 - protein, 19 aa, Human papillomavirus
IIFPLPSAPAVVIHTLDKS

SEQ ID NO: 1300 - protein, 19 aa, Human papillomavirus
IFPLPSAPAVVIHTLDKSF

SEQ ID NO: 1301 - protein, 19 aa, Human papillomavirus
FPLPSAPAVVIHTLDKSFD

SEQ ID NO: 1302 - protein, 19 aa, Human papillomavirus
PLPSAPAVVIHTLDKSFDY

SEQ ID NO: 1303 - protein, 19 aa, Human papillomavirus
LPSAPAVVIHTLDKSFDYY

SEQ ID NO: 1304 - protein, 19 aa, Human papillomavirus
PSAPAVVIHTLDKSFDYYL

SEQ ID NO: 1305 - protein, 20 aa, Human papillomavirus
VIYPGPTERPTIIFPLPSAP

SEQ ID NO: 1306 - protein, 20 aa, Human papillomavirus
IYPGPTERPTIIFPLPSAPA

SEQ ID NO: 1307 - protein, 20 aa, Human papillomavirus
YPGPTERPTIIFPLPSAPAV

SEQ ID NO: 1308 - protein, 20 aa, Human papillomavirus
PGPTERPTIIFPLPSAPAVV

SEQ ID NO: 1309 - protein, 20 aa, Human papillomavirus
GPTERPTIIFPLPSAPAVVI

SEQ ID NO: 1310 - protein, 20 aa, Human papillomavirus
PTERPTIIFPLPSAPAVVIH

SEQ ID NO: 1311 - protein, 20 aa, Human papillomavirus
TERPTIIFPLPSAPAVVIHT

SEQ ID NO: 1312 - protein, 20 aa, Human papillomavirus
ERPTIIFPLPSAPAVVIHTL

SEQ ID NO: 1313 - protein, 20 aa, Human papillomavirus
RPTIIFPLPSAPAVVIHTLD

SEQ ID NO: 1314 - protein, 20 aa, Human papillomavirus
PTIIFPLPSAPAVVIHTLDK

SEQ ID NO: 1315 - protein, 20 aa, Human papillomavirus
TIIFPLPSAPAVVIHTLDKS

SEQ ID NO: 1316 - protein, 20 aa, Human papillomavirus
IIFPLPSAPAVVIHTLDKSF

SEQ ID NO: 1317 - protein, 20 aa, Human papillomavirus
IFPLPSAPAVVIHTLDKSFD

SEQ ID NO: 1318 - protein, 20 aa, Human papillomavirus
FPLPSAPAVVIHTLDKSFDY

SEQ ID NO: 1319 - protein, 20 aa, Human papillomavirus
PLPSAPAVVIHTLDKSFDYY

SEQ ID NO: 1320 - protein, 20 aa, Human papillomavirus
LPSAPAVVIHTLDKSFDYYL

SEQ ID NO: 1321 - protein, 20 aa, Human papillomavirus
PSAPAVVIHTLDKSFDYYLH

SEQ ID NO: 1322 - protein, 8 aa, Human papillomavirus
TCQKPSAP

SEQ ID NO: 1323 - protein, 8 aa, Human papillomavirus
CQKPSAPK

SEQ ID NO: 1324 - protein, 8 aa, Human papillomavirus
QKPSAPKP

SEQ ID NO: 1325 - protein, 8 aa, Human papillomavirus
KPSAPKPK

SEQ ID NO: 1326 - protein, 8 aa, Human papillomavirus
PSAPKPKD

SEQ ID NO: 1327 - protein, 9 aa, Human papillomavirus
VTCQKPSAP

SEQ ID NO: 1328 - protein, 9 aa, Human papillomavirus
TCQKPSAPK

SEQ ID NO: 1329 - protein, 9 aa, Human papillomavirus
CQKPSAPKP

SEQ ID NO: 1330 - protein, 9 aa, Human papillomavirus
QKPSAPKPK

SEQ ID NO: 1331 - protein, 9 aa, Human papillomavirus
KPSAPKPKD

SEQ ID NO: 1332 - protein, 9 aa, Human papillomavirus
PSAPKPKDD

SEQ ID NO: 1333 - protein, 10 aa, Human papillomavirus
AVTCQKPSAP

SEQ ID NO: 1334 - protein, 10 aa, Human papillomavirus
VTCQKPSAPK

SEQ ID NO: 1335 - protein, 10 aa, Human papillomavirus
TCQKPSAPKP

SEQ ID NO: 1336 - protein, 10 aa, Human papillomavirus
CQKPSAPKPK

SEQ ID NO: 1337 - protein, 10 aa, Human papillomavirus
QKPSAPKPKD

SEQ ID NO: 1338 - protein, 10 aa, Human papillomavirus
KPSAPKPKDD

SEQ ID NO: 1339 - protein, 10 aa, Human papillomavirus
PSAPKPKDDP

SEQ ID NO: 1340 - protein, 11 aa, Human papillomavirus
QAVTCQKPSAP

SEQ ID NO: 1341 - protein, 11 aa, Human papillomavirus
AVTCQKPSAPK

SEQ ID NO: 1342 - protein, 11 aa, Human papillomavirus
VTCQKPSAPKP

SEQ ID NO: 1343 - protein, 11 aa, Human papillomavirus
TCQKPSAPKPK

SEQ ID NO: 1344 - protein, 11 aa, Human papillomavirus
CQKPSAPKPKD

SEQ ID NO: 1345 - protein, 11 aa, Human papillomavirus
QKPSAPKPKDD

SEQ ID NO: 1346 - protein, 11 aa, Human papillomavirus
KPSAPKPKDDP

SEQ ID NO: 1347 - protein, 11 aa, Human papillomavirus
PSAPKPKDDPL

SEQ ID NO: 1348 - protein, 12 aa, Human papillomavirus
SQAVTCQKPSAP

SEQ ID NO: 1349 - protein, 12 aa, Human papillomavirus
QAVTCQKPSAPK

SEQ ID NO: 1350 - protein, 12 aa, Human papillomavirus
AVTCQKPSAPKP

SEQ ID NO: 1351 - protein, 12 aa, Human papillomavirus
VTCQKPSAPKPK

SEQ ID NO: 1352 - protein, 12 aa, Human papillomavirus
TCQKPSAPKPKD

SEQ ID NO: 1353 - protein, 12 aa, Human papillomavirus
CQKPSAPKPKDD

SEQ ID NO: 1354 - protein, 12 aa, Human papillomavirus
QKPSAPKPKDDP

SEQ ID NO: 1355 - protein, 12 aa, Human papillomavirus
KPSAPKPKDDPL

SEQ ID NO: 1356 - protein, 12 aa, Human papillomavirus
PSAPKPKDDPLK

SEQ ID NO: 1357 - protein, 13 aa, Human papillomavirus
TSQAVTCQKPSAP

SEQ ID NO: 1358 - protein, 13 aa, Human papillomavirus
SQAVTCQKPSAPK

SEQ ID NO: 1359 - protein, 13 aa, Human papillomavirus
QAVTCQKPSAPKP

SEQ ID NO: 1360 - protein, 13 aa, Human papillomavirus
AVTCQKPSAPKPK

SEQ ID NO: 1361 - protein, 13 aa, Human papillomavirus
VTCQKPSAPKPKD

SEQ ID NO: 1362 - protein, 13 aa, Human papillomavirus
TCQKPSAPKPKDD

SEQ ID NO: 1363 - protein, 13 aa, Human papillomavirus
CQKPSAPKPKDDP

SEQ ID NO: 1364 - protein, 13 aa, Human papillomavirus
QKPSAPKPKDDPL

SEQ ID NO: 1365 - protein, 13 aa, Human papillomavirus
KPSAPKPKDDPLK

SEQ ID NO: 1366 - protein, 13 aa, Human papillomavirus
PSAPKPKDDPLKN

SEQ ID NO: 1367 - protein, 14 aa, Human papillomavirus
VTSQAVTCQKPSAP

SEQ ID NO: 1368 - protein, 14 aa, Human papillomavirus
TSQAVTCQKPSAPK

SEQ ID NO: 1369 - protein, 14 aa, Human papillomavirus
SQAVTCQKPSAPKP

SEQ ID NO: 1370 - protein, 14 aa, Human papillomavirus
QAVTCQKPSAPKPK

SEQ ID NO: 1371 - protein, 14 aa, Human papillomavirus
AVTCQKPSAPKPKD

SEQ ID NO: 1372 - protein, 14 aa, Human papillomavirus
VTCQKPSAPKPKDD

SEQ ID NO: 1373 - protein, 14 aa, Human papillomavirus
TCQKPSAPKPKDDP

SEQ ID NO: 1374 - protein, 14 aa, Human papillomavirus
CQKPSAPKPKDDPL

SEQ ID NO: 1375 - protein, 14 aa, Human papillomavirus
QKPSAPKPKDDPLK

SEQ ID NO: 1376 - protein, 14 aa, Human papillomavirus
KPSAPKPKDDPLKN

SEQ ID NO: 1377 - protein, 14 aa, Human papillomavirus
PSAPKPKDDPLKNY

SEQ ID NO: 1378 - protein, 15 aa, Human papillomavirus
YVTSQAVTCQKPSAP

SEQ ID NO: 1379 - protein, 15 aa, Human papillomavirus
VTSQAVTCQKPSAPK

SEQ ID NO: 1380 - protein, 15 aa, Human papillomavirus
TSQAVTCQKPSAPKP

SEQ ID NO: 1381 - protein, 15 aa, Human papillomavirus
SQAVTCQKPSAPKPK

SEQ ID NO: 1382 - protein, 15 aa, Human papillomavirus
QAVTCQKPSAPKPKD

SEQ ID NO: 1383 - protein, 15 aa, Human papillomavirus
AVTCQKPSAPKPKDD

SEQ ID NO: 1384 - protein, 15 aa, Human papillomavirus
VTCQKPSAPKPKDDP

SEQ ID NO: 1385 - protein, 15 aa, Human papillomavirus
TCQKPSAPKPKDDPL

SEQ ID NO: 1386 - protein, 15 aa, Human papillomavirus
CQKPSAPKPKDDPLK

SEQ ID NO: 1387 - protein, 15 aa, Human papillomavirus
QKPSAPKPKDDPLKN

SEQ ID NO: 1388 - protein, 15 aa, Human papillomavirus
KPSAPKPKDDPLKNY

SEQ ID NO: 1389 - protein, 15 aa, Human papillomavirus
PSAPKPKDDPLKNYT

SEQ ID NO: 1390 - protein, 16 aa, Human papillomavirus
RYVTSQAVTCQKPSAP

SEQ ID NO: 1391 - protein, 16 aa, Human papillomavirus
YVTSQAVTCQKPSAPK

SEQ ID NO: 1392 - protein, 16 aa, Human papillomavirus
VTSQAVTCQKPSAPKP

SEQ ID NO: 1393 - protein, 16 aa, Human papillomavirus
TSQAVTCQKPSAPKPK

SEQ ID NO: 1394 - protein, 16 aa, Human papillomavirus
SQAVTCQKPSAPKPKD

SEQ ID NO: 1395 - protein, 16 aa, Human papillomavirus
QAVTCQKPSAPKPKDD

SEQ ID NO: 1396 - protein, 16 aa, Human papillomavirus
AVTCQKPSAPKPKDDP

SEQ ID NO: 1397 - protein, 16 aa, Human papillomavirus
VTCQKPSAPKPKDDPL

SEQ ID NO: 1398 - protein, 16 aa, Human papillomavirus
TCQKPSAPKPKDDPLK

SEQ ID NO: 1399 - protein, 16 aa, Human papillomavirus
CQKPSAPKPKDDPLKN

SEQ ID NO: 1400 - protein, 16 aa, Human papillomavirus
QKPSAPKPKDDPLKNY

SEQ ID NO: 1401 - protein, 16 aa, Human papillomavirus
KPSAPKPKDDPLKNYT

SEQ ID NO: 1402 - protein, 16 aa, Human papillomavirus
PSAPKPKDDPLKNYTF

SEQ ID NO: 1403 - protein, 17 aa, Human papillomavirus
YRYVTSQAVTCQKPSAP

SEQ ID NO: 1404 - protein, 17 aa, Human papillomavirus
RYVTSQAVTCQKPSAPK

SEQ ID NO: 1405 - protein, 17 aa, Human papillomavirus
YVTSQAVTCQKPSAPKP

SEQ ID NO: 1406 - protein, 17 aa, Human papillomavirus
VTSQAVTCQKPSAPKPK

SEQ ID NO: 1407 - protein, 17 aa, Human papillomavirus
TSQAVTCQKPSAPKPKD

SEQ ID NO: 1408 - protein, 17 aa, Human papillomavirus
SQAVTCQKPSAPKPKDD

SEQ ID NO: 1409 - protein, 17 aa, Human papillomavirus
QAVTCQKPSAPKPKDDP

SEQ ID NO: 1410 - protein, 17 aa, Human papillomavirus
AVTCQKPSAPKPKDDPL

SEQ ID NO: 1411 - protein, 17 aa, Human papillomavirus
VTCQKPSAPKPKDDPLK

SEQ ID NO: 1412 - protein, 17 aa, Human papillomavirus
TCQKPSAPKPKDDPLKN

SEQ ID NO: 1413 - protein, 17 aa, Human papillomavirus
CQKPSAPKPKDDPLKNY

SEQ ID NO: 1414 - protein, 17 aa, Human papillomavirus
QKPSAPKPKDDPLKNYT

SEQ ID NO: 1415 - protein, 17 aa, Human papillomavirus
KPSAPKPKDDPLKNYTF

SEQ ID NO: 1416 - protein, 17 aa, Human papillomavirus
PSAPKPKDDPLKNYTFW

SEQ ID NO: 1417 - protein, 18 aa, Human papillomavirus
TYRYVTSQAVTCQKPSAP

SEQ ID NO: 1418 - protein, 18 aa, Human papillomavirus
YRYVTSQAVTCQKPSAPK

SEQ ID NO: 1419 - protein, 18 aa, Human papillomavirus
RYVTSQAVTCQKPSAPKP

SEQ ID NO: 1420 - protein, 18 aa, Human papillomavirus
YVTSQAVTCQKPSAPKPK

SEQ ID NO: 1421 - protein, 18 aa, Human papillomavirus
VTSQAVTCQKPSAPKPKD

SEQ ID NO: 1422 - protein, 18 aa, Human papillomavirus
TSQAVTCQKPSAPKPKDD

SEQ ID NO: 1423 - protein, 18 aa, Human papillomavirus
SQAVTCQKPSAPKPKDDP

SEQ ID NO: 1424 - protein, 18 aa, Human papillomavirus
QAVTCQKPSAPKPKDDPL

SEQ ID NO: 1425 - protein, 18 aa, Human papillomavirus
AVTCQKPSAPKPKDDPLK

SEQ ID NO: 1426 - protein, 18 aa, Human papillomavirus
VTCQKPSAPKPKDDPLKN

SEQ ID NO: 1427 - protein, 18 aa, Human papillomavirus
TCQKPSAPKPKDDPLKNY

SEQ ID NO: 1428 - protein, 18 aa, Human papillomavirus
CQKPSAPKPKDDPLKNYT

SEQ ID NO: 1429 - protein, 18 aa, Human papillomavirus
QKPSAPKPKDDPLKNYTF

SEQ ID NO: 1430 - protein, 18 aa, Human papillomavirus
KPSAPKPKDDPLKNYTFW

SEQ ID NO: 1431 - protein, 18 aa, Human papillomavirus
PSAPKPKDDPLKNYTFWE

SEQ ID NO: 1432 - protein, 19 aa, Human papillomavirus
DTYRYVTSQAVTCQKPSAP

SEQ ID NO: 1433 - protein, 19 aa, Human papillomavirus
TYRYVTSQAVTCQKPSAPK

SEQ ID NO: 1434 - protein, 19 aa, Human papillomavirus
YRYVTSQAVTCQKPSAPKP

SEQ ID NO: 1435 - protein, 19 aa, Human papillomavirus
RYVTSQAVTCQKPSAPKPK

SEQ ID NO: 1436 - protein, 19 aa, Human papillomavirus
YVTSQAVTCQKPSAPKPKD

SEQ ID NO: 1437 - protein, 19 aa, Human papillomavirus
VTSQAVTCQKPSAPKPKDD

SEQ ID NO: 1438 - protein, 19 aa, Human papillomavirus
TSQAVTCQKPSAPKPKDDP

SEQ ID NO: 1439 - protein, 19 aa, Human papillomavirus
SQAVTCQKPSAPKPKDDPL

SEQ ID NO: 1440 - protein, 19 aa, Human papillomavirus
QAVTCQKPSAPKPKDDPLK

SEQ ID NO: 1441 - protein, 19 aa, Human papillomavirus
AVTCQKPSAPKPKDDPLKN

SEQ ID NO: 1442 - protein, 19 aa, Human papillomavirus
VTCQKPSAPKPKDDPLKNY

SEQ ID NO: 1443 - protein, 19 aa, Human papillomavirus
TCQKPSAPKPKDDPLKNYT

SEQ ID NO: 1444 - protein, 19 aa, Human papillomavirus
CQKPSAPKPKDDPLKNYTF

SEQ ID NO: 1445 - protein, 19 aa, Human papillomavirus
QKPSAPKPKDDPLKNYTFW

SEQ ID NO: 1446 - protein, 19 aa, Human papillomavirus
KPSAPKPKDDPLKNYTFWE

SEQ ID NO: 1447 - protein, 19 aa, Human papillomavirus
PSAPKPKDDPLKNYTFWEV

SEQ ID NO: 1448 - protein, 20 aa, Human papillomavirus
EDTYRYVTSQAVTCQKPSAP

SEQ ID NO: 1449 - protein, 20 aa, Human papillomavirus
DTYRYVTSQAVTCQKPSAPK

SEQ ID NO: 1450 - protein, 20 aa, Human papillomavirus
TYRYVTSQAVTCQKPSAPKP

SEQ ID NO: 1451 - protein, 20 aa, Human papillomavirus
YRYVTSQAVTCQKPSAPKPK

SEQ ID NO: 1452 - protein, 20 aa, Human papillomavirus
RYVTSQAVTCQKPSAPKPKD

SEQ ID NO: 1453 - protein, 20 aa, Human papillomavirus
YVTSQAVTCQKPSAPKPKDD

SEQ ID NO: 1454 - protein, 20 aa, Human papillomavirus
VTSQAVTCQKPSAPKPKDDP

SEQ ID NO: 1455 - protein, 20 aa, Human papillomavirus
TSQAVTCQKPSAPKPKDDPL

SEQ ID NO: 1456 - protein, 20 aa, Human papillomavirus
SQAVTCQKPSAPKPKDDPLK

SEQ ID NO: 1457 - protein, 20 aa, Human papillomavirus
QAVTCQKPSAPKPKDDPLKN

SEQ ID NO: 1458 - protein, 20 aa, Human papillomavirus
AVTCQKPSAPKPKDDPLKNY

SEQ ID NO: 1459 - protein, 20 aa, Human papillomavirus
VTCQKPSAPKPKDDPLKNYT

SEQ ID NO: 1460 - protein, 20 aa, Human papillomavirus
TCQKPSAPKPKDDPLKNYTF

SEQ ID NO: 1461 - protein, 20 aa, Human papillomavirus
CQKPSAPKPKDDPLKNYTFW

SEQ ID NO: 1462 - protein, 20 aa, Human papillomavirus
QKPSAPKPKDDPLKNYTFWE

SEQ ID NO: 1463 - protein, 20 aa, Human papillomavirus
KPSAPKPKDDPLKNYTFWEV

SEQ ID NO: 1464 - protein, 20 aa, Human papillomavirus
PSAPKPKDDPLKNYTFWEVD

SEQ ID NO: 1465 - protein, 8 aa, Human papillomavirus
DITFPTAP

SEQ ID NO: 1466 - protein, 8 aa, Human papillomavirus
ITFPTAPM

SEQ ID NO: 1467 - protein, 8 aa, Human papillomavirus
TFPTAPMG

SEQ ID NO: 1468 - protein, 8 aa, Human papillomavirus
FPTAPMGT

SEQ ID NO: 1469 - protein, 8 aa, Human papillomavirus
PTAPMGTP

SEQ ID NO: 1470 - protein, 9 aa, Human papillomavirus
PDITFPTAP

SEQ ID NO: 1471 - protein, 9 aa, Human papillomavirus
DITFPTAPM

SEQ ID NO: 1472 - protein, 9 aa, Human papillomavirus
ITFPTAPMG

SEQ ID NO: 1473 - protein, 9 aa, Human papillomavirus
TFPTAPMGT

SEQ ID NO: 1474 - protein, 9 aa, Human papillomavirus
FPTAPMGTP

SEQ ID NO: 1475 - protein, 9 aa, Human papillomavirus
PTAPMGTPF

SEQ ID NO: 1476 - protein, 10 aa, Human papillomavirus
GPDITFPTAP

SEQ ID NO: 1477 - protein, 10 aa, Human papillomavirus
PDITFPTAPM

SEQ ID NO: 1478 - protein, 10 aa, Human papillomavirus
DITFPTAPMG

SEQ ID NO: 1479 - protein, 10 aa, Human papillomavirus
ITFPTAPMGT

SEQ ID NO: 1480 - protein, 10 aa, Human papillomavirus
TFPTAPMGTP

SEQ ID NO: 1481 - protein, 10 aa, Human papillomavirus
FPTAPMGTPF

SEQ ID NO: 1482 - protein, 10 aa, Human papillomavirus
PTAPMGTPFS

SEQ ID NO: 1483 - protein, 11 aa, Human papillomavirus
SGPDITFPTAP

SEQ ID NO: 1484 - protein, 11 aa, Human papillomavirus
GPDITFPTAPM

SEQ ID NO: 1485 - protein, 11 aa, Human papillomavirus
PDITFPTAPMG

SEQ ID NO: 1486 - protein, 11 aa, Human papillomavirus
DITFPTAPMGT

SEQ ID NO: 1487 - protein, 11 aa, Human papillomavirus
ITFPTAPMGTP

SEQ ID NO: 1488 - protein, 11 aa, Human papillomavirus
TFPTAPMGTPF

SEQ ID NO: 1489 - protein, 11 aa, Human papillomavirus
FPTAPMGTPFS

SEQ ID NO: 1490 - protein, 11 aa, Human papillomavirus
PTAPMGTPFSP

SEQ ID NO: 1491 - protein, 12 aa, Human papillomavirus
QSGPDITFPTAP

SEQ ID NO: 1492 - protein, 12 aa, Human papillomavirus
SGPDITFPTAPM

SEQ ID NO: 1493 - protein, 12 aa, Human papillomavirus
GPDITFPTAPMG

SEQ ID NO: 1494 - protein, 12 aa, Human papillomavirus
PDITFPTAPMGT

SEQ ID NO: 1495 - protein, 12 aa, Human papillomavirus
DITFPTAPMGTP

SEQ ID NO: 1496 - protein, 12 aa, Human papillomavirus
ITFPTAPMGTPF

SEQ ID NO: 1497 - protein, 12 aa, Human papillomavirus
TFPTAPMGTPFS

SEQ ID NO: 1498 - protein, 12 aa, Human papillomavirus
FPTAPMGTPFSP

SEQ ID NO: 1499 - protein, 12 aa, Human papillomavirus
PTAPMGTPFSPV

SEQ ID NO: 1500 - protein, 13 aa, Human papillomavirus
LQSGPDITFPTAP

SEQ ID NO: 1501 - protein, 13 aa, Human papillomavirus
QSGPDITFPTAPM

SEQ ID NO: 1502 - protein, 13 aa, Human papillomavirus
SGPDITFPTAPMG

SEQ ID NO: 1503 - protein, 13 aa, Human papillomavirus
GPDITFPTAPMGT

SEQ ID NO: 1504 - protein, 13 aa, Human papillomavirus
PDITFPTAPMGTP

SEQ ID NO: 1505 - protein, 13 aa, Human papillomavirus
DITFPTAPMGTPF

SEQ ID NO: 1506 - protein, 13 aa, Human papillomavirus
ITFPTAPMGTPFS

SEQ ID NO: 1507 - protein, 13 aa, Human papillomavirus
TFPTAPMGTPFSP

SEQ ID NO: 1508 - protein, 13 aa, Human papillomavirus
FPTAPMGTPFSPV

SEQ ID NO: 1509 - protein, 13 aa, Human papillomavirus
PTAPMGTPFSPVT

SEQ ID NO: 1510 - protein, 14 aa, Human papillomavirus
FLQSGPDITFPTAP

SEQ ID NO: 1511 - protein, 14 aa, Human papillomavirus
LQSGPDITFPTAPM

SEQ ID NO: 1512 - protein, 14 aa, Human papillomavirus
QSGPDITFPTAPMG

SEQ ID NO: 1513 - protein, 14 aa, Human papillomavirus
SGPDITFPTAPMGT

SEQ ID NO: 1514 - protein, 14 aa, Human papillomavirus
GPDITFPTAPMGTP

SEQ ID NO: 1515 - protein, 14 aa, Human papillomavirus
PDITFPTAPMGTPF

SEQ ID NO: 1516 - protein, 14 aa, Human papillomavirus
DITFPTAPMGTPFS

SEQ ID NO: 1517 - protein, 14 aa, Human papillomavirus
ITFPTAPMGTPFSP

SEQ ID NO: 1518 - protein, 14 aa, Human papillomavirus
TFPTAPMGTPFSPV

SEQ ID NO: 1519 - protein, 14 aa, Human papillomavirus
FPTAPMGTPFSPVT

SEQ ID NO: 1520 - protein, 14 aa, Human papillomavirus
PTAPMGTPFSPVTP

SEQ ID NO: 1521 - protein, 15 aa, Human papillomavirus
LFLQSGPDITFPTAP

SEQ ID NO: 1522 - protein, 15 aa, Human papillomavirus
FLQSGPDITFPTAPM

SEQ ID NO: 1523 - protein, 15 aa, Human papillomavirus
LQSGPDITFPTAPMG

SEQ ID NO: 1524 - protein, 15 aa, Human papillomavirus
QSGPDITFPTAPMGT

SEQ ID NO: 1525 - protein, 15 aa, Human papillomavirus
SGPDITFPTAPMGTP

SEQ ID NO: 1526 - protein, 15 aa, Human papillomavirus
GPDITFPTAPMGTPF

SEQ ID NO: 1527 - protein, 15 aa, Human papillomavirus
PDITFPTAPMGTPFS

SEQ ID NO: 1528 - protein, 15 aa, Human papillomavirus
DITFPTAPMGTPFSP

SEQ ID NO: 1529 - protein, 15 aa, Human papillomavirus
ITFPTAPMGTPFSPV

SEQ ID NO: 1530 - protein, 15 aa, Human papillomavirus
TFPTAPMGTPFSPVT

SEQ ID NO: 1531 - protein, 15 aa, Human papillomavirus
FPTAPMGTPFSPVTP

SEQ ID NO: 1532 - protein, 15 aa, Human papillomavirus
PTAPMGTPFSPVTPA

SEQ ID NO: 1533 - protein, 16 aa, Human papillomavirus
DLFLQSGPDITFPTAP

SEQ ID NO: 1534 - protein, 16 aa, Human papillomavirus
LFLQSGPDITFPTAPM

SEQ ID NO: 1535 - protein, 16 aa, Human papillomavirus
FLQSGPDITFPTAPMG

SEQ ID NO: 1536 - protein, 16 aa, Human papillomavirus
LQSGPDITFPTAPMGT

SEQ ID NO: 1537 - protein, 16 aa, Human papillomavirus
QSGPDITFPTAPMGTP

SEQ ID NO: 1538 - protein, 16 aa, Human papillomavirus
SGPDITFPTAPMGTPF

SEQ ID NO: 1539 - protein, 16 aa, Human papillomavirus
GPDITFPTAPMGTPFS

SEQ ID NO: 1540 - protein, 16 aa, Human papillomavirus
PDITFPTAPMGTPFSP

SEQ ID NO: 1541 - protein, 16 aa, Human papillomavirus
DITFPTAPMGTPFSPV

SEQ ID NO: 1542 - protein, 16 aa, Human papillomavirus
ITFPTAPMGTPFSPVT

SEQ ID NO: 1543 - protein, 16 aa, Human papillomavirus
TFPTAPMGTPFSPVTP

SEQ ID NO: 1544 - protein, 16 aa, Human papillomavirus
FPTAPMGTPFSPVTPA

SEQ ID NO: 1545 - protein, 16 aa, Human papillomavirus
PTAPMGTPFSPVTPAL

SEQ ID NO: 1546 - protein, 17 aa, Human papillomavirus
NDLFLQSGPDITFPTAP

SEQ ID NO: 1547 - protein, 17 aa, Human papillomavirus
DLFLQSGPDITFPTAPM

SEQ ID NO: 1548 - protein, 17 aa, Human papillomavirus
LFLQSGPDITFPTAPMG

SEQ ID NO: 1549 - protein, 17 aa, Human papillomavirus
FLQSGPDITFPTAPMGT

SEQ ID NO: 1550 - protein, 17 aa, Human papillomavirus
LQSGPDITFPTAPMGTP

SEQ ID NO: 1551 - protein, 17 aa, Human papillomavirus
QSGPDITFPTAPMGTPF

SEQ ID NO: 1552 - protein, 17 aa, Human papillomavirus
SGPDITFPTAPMGTPFS

SEQ ID NO: 1553 - protein, 17 aa, Human papillomavirus
GPDITFPTAPMGTPFSP

SEQ ID NO: 1554 - protein, 17 aa, Human papillomavirus
PDITFPTAPMGTPFSPV

SEQ ID NO: 1555 - protein, 17 aa, Human papillomavirus
DITFPTAPMGTPFSPVT

SEQ ID NO: 1556 - protein, 17 aa, Human papillomavirus
ITFPTAPMGTPFSPVTP

SEQ ID NO: 1557 - protein, 17 aa, Human papillomavirus
TFPTAPMGTPFSPVTPA

SEQ ID NO: 1558 - protein, 17 aa, Human papillomavirus
FPTAPMGTPFSPVTPAL

SEQ ID NO: 1559 - protein, 17 aa, Human papillomavirus
PTAPMGTPFSPVTPALP

SEQ ID NO: 1560 - protein, 18 aa, Human papillomavirus
PNDLFLQSGPDITFPTAP

SEQ ID NO: 1561 - protein, 18 aa, Human papillomavirus
NDLFLQSGPDITFPTAPM

SEQ ID NO: 1562 - protein, 18 aa, Human papillomavirus
DLFLQSGPDITFPTAPMG

SEQ ID NO: 1563 - protein, 18 aa, Human papillomavirus
LFLQSGPDITFPTAPMGT

SEQ ID NO: 1564 - protein, 18 aa, Human papillomavirus
FLQSGPDITFPTAPMGTP

SEQ ID NO: 1565 - protein, 18 aa, Human papillomavirus
LQSGPDITFPTAPMGTPF

SEQ ID NO: 1566 - protein, 18 aa, Human papillomavirus
QSGPDITFPTAPMGTPFS

SEQ ID NO: 1567 - protein, 18 aa, Human papillomavirus
SGPDITFPTAPMGTPFSP

SEQ ID NO: 1568 - protein, 18 aa, Human papillomavirus
GPDITFPTAPMGTPFSPV

SEQ ID NO: 1569 - protein, 18 aa, Human papillomavirus
PDITFPTAPMGTPFSPVT

SEQ ID NO: 1570 - protein, 18 aa, Human papillomavirus
DITFPTAPMGTPFSPVTP

SEQ ID NO: 1571 - protein, 18 aa, Human papillomavirus
ITFPTAPMGTPFSPVTPA

SEQ ID NO: 1572 - protein, 18 aa, Human papillomavirus
TFPTAPMGTPFSPVTPAL

SEQ ID NO: 1573 - protein, 18 aa, Human papillomavirus
FPTAPMGTPFSPVTPALP

SEQ ID NO: 1574 - protein, 18 aa, Human papillomavirus
PTAPMGTPFSPVTPALPT

SEQ ID NO: 1575 - protein, 19 aa, Human papillomavirus
LPNDLFLQSGPDITFPTAP

SEQ ID NO: 1576 - protein, 19 aa, Human papillomavirus
PNDLFLQSGPDITFPTAPM

SEQ ID NO: 1577 - protein, 19 aa, Human papillomavirus
NDLFLQSGPDITFPTAPMG

SEQ ID NO: 1578 - protein, 19 aa, Human papillomavirus
DLFLQSGPDITFPTAPMGT

SEQ ID NO: 1579 - protein, 19 aa, Human papillomavirus
LFLQSGPDITFPTAPMGTP

SEQ ID NO: 1580 - protein, 19 aa, Human papillomavirus
FLQSGPDITFPTAPMGTPF

SEQ ID NO: 1581 - protein, 19 aa, Human papillomavirus
LQSGPDITFPTAPMGTPFS

SEQ ID NO: 1582 - protein, 19 aa, Human papillomavirus
QSGPDITFPTAPMGTPFSP

SEQ ID NO: 1583 - protein, 19 aa, Human papillomavirus
SGPDITFPTAPMGTPFSPV

SEQ ID NO: 1584 - protein, 19 aa, Human papillomavirus
GPDITFPTAPMGTPFSPVT

SEQ ID NO: 1585 - protein, 19 aa, Human papillomavirus
PDITFPTAPMGTPFSPVTP

SEQ ID NO: 1586 - protein, 19 aa, Human papillomavirus
DITFPTAPMGTPFSPVTPA

SEQ ID NO: 1587 - protein, 19 aa, Human papillomavirus
ITFPTAPMGTPFSPVTPAL

SEQ ID NO: 1588 - protein, 19 aa, Human papillomavirus
TFPTAPMGTPFSPVTPALP

SEQ ID NO: 1589 - protein, 19 aa, Human papillomavirus
FPTAPMGTPFSPVTPALPT

SEQ ID NO: 1590 - protein, 19 aa, Human papillomavirus
PTAPMGTPFSPVTPALPTG

SEQ ID NO: 1591 - protein, 20 aa, Human papillomavirus
SLPNDLFLQSGPDITFPTAP

SEQ ID NO: 1592 - protein, 20 aa, Human papillomavirus
LPNDLFLQSGPDITFPTAPM

SEQ ID NO: 1593 - protein, 20 aa, Human papillomavirus
PNDLFLQSGPDITFPTAPMG

SEQ ID NO: 1594 - protein, 20 aa, Human papillomavirus
NDLFLQSGPDITFPTAPMGT

SEQ ID NO: 1595 - protein, 20 aa, Human papillomavirus
DLFLQSGPDITFPTAPMGTP

SEQ ID NO: 1596 - protein, 20 aa, Human papillomavirus
LFLQSGPDITFPTAPMGTPF

SEQ ID NO: 1597 - protein, 20 aa, Human papillomavirus
FLQSGPDITFPTAPMGTPFS

SEQ ID NO: 1598 - protein, 20 aa, Human papillomavirus
LQSGPDITFPTAPMGTPFSP

SEQ ID NO: 1599 - protein, 20 aa, Human papillomavirus
QSGPDITFPTAPMGTPFSPV

SEQ ID NO: 1600 - protein, 20 aa, Human papillomavirus
SGPDITFPTAPMGTPFSPVT

SEQ ID NO: 1601 - protein, 20 aa, Human papillomavirus
GPDITFPTAPMGTPFSPVTP

SEQ ID NO: 1602 - protein, 20 aa, Human papillomavirus
PDITFPTAPMGTPFSPVTPA

SEQ ID NO: 1603 - protein, 20 aa, Human papillomavirus
DITFPTAPMGTPFSPVTPAL

SEQ ID NO: 1604 - protein, 20 aa, Human papillomavirus
ITFPTAPMGTPFSPVTPALP

SEQ ID NO: 1605 - protein, 20 aa, Human papillomavirus
TFPTAPMGTPFSPVTPALPT

SEQ ID NO: 1606 - protein, 20 aa, Human papillomavirus
FPTAPMGTPFSPVTPALPTG

SEQ ID NO: 1607 - protein, 20 aa, Human papillomavirus
PTAPMGTPFSPVTPALPTGP

SEQ ID NO: 1608 - protein, 8 aa, Human papillomavirus
RPIDPTAP

SEQ ID NO: 1609 - protein, 8 aa, Human papillomavirus
PIDPTAPS

SEQ ID NO: 1610 - protein, 8 aa, Human papillomavirus
IDPTAPSI

SEQ ID NO: 1611 - protein, 8 aa, Human papillomavirus
DPTAPSIV

SEQ ID NO: 1612 - protein, 8 aa, Human papillomavirus
PTAPSIVT

SEQ ID NO: 1613 - protein, 9 aa, Human papillomavirus
VRPIDPTAP

SEQ ID NO: 1614 - protein, 9 aa, Human papillomavirus
RPIDPTAPS

SEQ ID NO: 1615 - protein, 9 aa, Human papillomavirus
PIDPTAPSI

SEQ ID NO: 1616 - protein, 9 aa, Human papillomavirus
IDPTAPSIV

SEQ ID NO: 1617 - protein, 9 aa, Human papillomavirus
DPTAPSIVT

SEQ ID NO: 1618 - protein, 9 aa, Human papillomavirus
PTAPSIVTG

SEQ ID NO: 1619 - protein, 10 aa, Human papillomavirus
TVRPIDPTAP

SEQ ID NO: 1620 - protein, 10 aa, Human papillomavirus
VRPIDPTAPS

SEQ ID NO: 1621 - protein, 10 aa, Human papillomavirus
RPIDPTAPSI

SEQ ID NO: 1622 - protein, 10 aa, Human papillomavirus
PIDPTAPSIV

SEQ ID NO: 1623 - protein, 10 aa, Human papillomavirus
IDPTAPSIVT

SEQ ID NO: 1624 - protein, 10 aa, Human papillomavirus
DPTAPSIVTG

SEQ ID NO: 1625 - protein, 10 aa, Human papillomavirus
PTAPSIVTGT

SEQ ID NO: 1626 - protein, 11 aa, Human papillomavirus
DTVRPIDPTAP

SEQ ID NO: 1627 - protein, 11 aa, Human papillomavirus
TVRPIDPTAPS

SEQ ID NO: 1628 - protein, 11 aa, Human papillomavirus
VRPIDPTAPSI

SEQ ID NO: 1629 - protein, 11 aa, Human papillomavirus
RPIDPTAPSIV

SEQ ID NO: 1630 - protein, 11 aa, Human papillomavirus
PIDPTAPSIVT

SEQ ID NO: 1631 - protein, 11 aa, Human papillomavirus
IDPTAPSIVTG

SEQ ID NO: 1632 - protein, 11 aa, Human papillomavirus
DPTAPSIVTGT

SEQ ID NO: 1633 - protein, 11 aa, Human papillomavirus
PTAPSIVTGTD

SEQ ID NO: 1634 - protein, 12 aa, Human papillomavirus
LDTVRPIDPTAP

SEQ ID NO: 1635 - protein, 12 aa, Human papillomavirus
DTVRPIDPTAPS

SEQ ID NO: 1636 - protein, 12 aa, Human papillomavirus
TVRPIDPTAPSI

SEQ ID NO: 1637 - protein, 12 aa, Human papillomavirus
VRPIDPTAPSIV

SEQ ID NO: 1638 - protein, 12 aa, Human papillomavirus
RPIDPTAPSIVT

SEQ ID NO: 1639 - protein, 12 aa, Human papillomavirus
PIDPTAPSIVTG

SEQ ID NO: 1640 - protein, 12 aa, Human papillomavirus
IDPTAPSIVTGT

SEQ ID NO: 1641 - protein, 12 aa, Human papillomavirus
DPTAPSIVTGTD

SEQ ID NO: 1642 - protein, 12 aa, Human papillomavirus
PTAPSIVTGTDS

SEQ ID NO: 1643 - protein, 13 aa, Human papillomavirus
PLDTVRPIDPTAP

SEQ ID NO: 1644 - protein, 13 aa, Human papillomavirus
LDTVRPIDPTAPS

SEQ ID NO: 1645 - protein, 13 aa, Human papillomavirus
DTVRPIDPTAPSI

SEQ ID NO: 1646 - protein, 13 aa, Human papillomavirus
TVRPIDPTAPSIV

SEQ ID NO: 1647 - protein, 13 aa, Human papillomavirus
VRPIDPTAPSIVT

SEQ ID NO: 1648 - protein, 13 aa, Human papillomavirus
RPIDPTAPSIVTG

SEQ ID NO: 1649 - protein, 13 aa, Human papillomavirus
PIDPTAPSIVTGT

SEQ ID NO: 1650 - protein, 13 aa, Human papillomavirus
IDPTAPSIVTGTD

SEQ ID NO: 1651 - protein, 13 aa, Human papillomavirus
DPTAPSIVTGTDS

SEQ ID NO: 1652 - protein, 13 aa, Human papillomavirus
PTAPSIVTGTDST

SEQ ID NO: 1653 - protein, 14 aa, Human papillomavirus
IPLDTVRPIDPTAP

SEQ ID NO: 1654 - protein, 14 aa, Human papillomavirus
PLDTVRPIDPTAPS

SEQ ID NO: 1655 - protein, 14 aa, Human papillomavirus
LDTVRPIDPTAPSI

SEQ ID NO: 1656 - protein, 14 aa, Human papillomavirus
DTVRPIDPTAPSIV

SEQ ID NO: 1657 - protein, 14 aa, Human papillomavirus
TVRPIDPTAPSIVT

SEQ ID NO: 1658 - protein, 14 aa, Human papillomavirus
VRPIDPTAPSIVTG

SEQ ID NO: 1659 - protein, 14 aa, Human papillomavirus
RPIDPTAPSIVTGT

SEQ ID NO: 1660 - protein, 14 aa, Human papillomavirus
PIDPTAPSIVTGTD

SEQ ID NO: 1661 - protein, 14 aa, Human papillomavirus
IDPTAPSIVTGTDS

SEQ ID NO: 1662 - protein, 14 aa, Human papillomavirus
DPTAPSIVTGTDST

SEQ ID NO: 1663 - protein, 14 aa, Human papillomavirus
PTAPSIVTGTDSTV

SEQ ID NO: 1664 - protein, 15 aa, Human papillomavirus
LIPLDTVRPIDPTAP

SEQ ID NO: 1665 - protein, 15 aa, Human papillomavirus
IPLDTVRPIDPTAPS

SEQ ID NO: 1666 - protein, 15 aa, Human papillomavirus
PLDTVRPIDPTAPSI

SEQ ID NO: 1667 - protein, 15 aa, Human papillomavirus
LDTVRPIDPTAPSIV

SEQ ID NO: 1668 - protein, 15 aa, Human papillomavirus
DTVRPIDPTAPSIVT

SEQ ID NO: 1669 - protein, 15 aa, Human papillomavirus
TVRPIDPTAPSIVTG

SEQ ID NO: 1670 - protein, 15 aa, Human papillomavirus
VRPIDPTAPSIVTGT

SEQ ID NO: 1671 - protein, 15 aa, Human papillomavirus
RPIDPTAPSIVTGTD

SEQ ID NO: 1672 - protein, 15 aa, Human papillomavirus
PIDPTAPSIVTGTDS

SEQ ID NO: 1673 - protein, 15 aa, Human papillomavirus
IDPTAPSIVTGTDST

SEQ ID NO: 1674 - protein, 15 aa, Human papillomavirus
DPTAPSIVTGTDSTV

SEQ ID NO: 1675 - protein, 15 aa, Human papillomavirus
PTAPSIVTGTDSTVD

SEQ ID NO: 1676 - protein, 16 aa, Human papillomavirus
DLIPLDTVRPIDPTAP

SEQ ID NO: 1677 - protein, 16 aa, Human papillomavirus
LIPLDTVRPIDPTAPS

SEQ ID NO: 1678 - protein, 16 aa, Human papillomavirus
IPLDTVRPIDPTAPSI

SEQ ID NO: 1679 - protein, 16 aa, Human papillomavirus
PLDTVRPIDPTAPSIV

SEQ ID NO: 1680 - protein, 16 aa, Human papillomavirus
LDTVRPIDPTAPSIVT

SEQ ID NO: 1681 - protein, 16 aa, Human papillomavirus
DTVRPIDPTAPSIVTG

SEQ ID NO: 1682 - protein, 16 aa, Human papillomavirus
TVRPIDPTAPSIVTGT

SEQ ID NO: 1683 - protein, 16 aa, Human papillomavirus
VRPIDPTAPSIVTGTD

SEQ ID NO: 1684 - protein, 16 aa, Human papillomavirus
RPIDPTAPSIVTGTDS

SEQ ID NO: 1685 - protein, 16 aa, Human papillomavirus
PIDPTAPSIVTGTDST

SEQ ID NO: 1686 - protein, 16 aa, Human papillomavirus
IDPTAPSIVTGTDSTV

SEQ ID NO: 1687 - protein, 16 aa, Human papillomavirus
DPTAPSIVTGTDSTVD

SEQ ID NO: 1688 - protein, 16 aa, Human papillomavirus
PTAPSIVTGTDSTVDL

SEQ ID NO: 1689 - protein, 17 aa, Human papillomavirus
TDLIPLDTVRPIDPTAP

SEQ ID NO: 1690 - protein, 17 aa, Human papillomavirus
DLIPLDTVRPIDPTAPS

SEQ ID NO: 1691 - protein, 17 aa, Human papillomavirus
LIPLDTVRPIDPTAPSI

SEQ ID NO: 1692 - protein, 17 aa, Human papillomavirus
IPLDTVRPIDPTAPSIV

SEQ ID NO: 1693 - protein, 17 aa, Human papillomavirus
PLDTVRPIDPTAPSIVT

SEQ ID NO: 1694 - protein, 17 aa, Human papillomavirus
LDTVRPIDPTAPSIVTG

SEQ ID NO: 1695 - protein, 17 aa, Human papillomavirus
DTVRPIDPTAPSIVTGT

SEQ ID NO: 1696 - protein, 17 aa, Human papillomavirus
TVRPIDPTAPSIVTGTD

SEQ ID NO: 1697 - protein, 17 aa, Human papillomavirus
VRPIDPTAPSIVTGTDS

SEQ ID NO: 1698 - protein, 17 aa, Human papillomavirus
RPIDPTAPSIVTGTDST

SEQ ID NO: 1699 - protein, 17 aa, Human papillomavirus
PIDPTAPSIVTGTDSTV

SEQ ID NO: 1700 - protein, 17 aa, Human papillomavirus
IDPTAPSIVTGTDSTVD

SEQ ID NO: 1701 - protein, 17 aa, Human papillomavirus
DPTAPSIVTGTDSTVDL

SEQ ID NO: 1702 - protein, 17 aa, Human papillomavirus
PTAPSIVTGTDSTVDLL

SEQ ID NO: 1703 - protein, 18 aa, Human papillomavirus
PTDLIPLDTVRPIDPTAP

SEQ ID NO: 1704 - protein, 18 aa, Human papillomavirus
TDLIPLDTVRPIDPTAPS

SEQ ID NO: 1705 - protein, 18 aa, Human papillomavirus
DLIPLDTVRPIDPTAPSI

SEQ ID NO: 1706 - protein, 18 aa, Human papillomavirus
LIPLDTVRPIDPTAPSIV

SEQ ID NO: 1707 - protein, 18 aa, Human papillomavirus
IPLDTVRPIDPTAPSIVT

SEQ ID NO: 1708 - protein, 18 aa, Human papillomavirus
PLDTVRPIDPTAPSIVTG

SEQ ID NO: 1709 - protein, 18 aa, Human papillomavirus
LDTVRPIDPTAPSIVTGT

SEQ ID NO: 1710 - protein, 18 aa, Human papillomavirus
DTVRPIDPTAPSIVTGTD

SEQ ID NO: 1711 - protein, 18 aa, Human papillomavirus
TVRPIDPTAPSIVTGTDS

SEQ ID NO: 1712 - protein, 18 aa, Human papillomavirus
VRPIDPTAPSIVTGTDST

SEQ ID NO: 1713 - protein, 18 aa, Human papillomavirus
RPIDPTAPSIVTGTDSTV

SEQ ID NO: 1714 - protein, 18 aa, Human papillomavirus
PIDPTAPSIVTGTDSTVD

SEQ ID NO: 1715 - protein, 18 aa, Human papillomavirus
IDPTAPSIVTGTDSTVDL

SEQ ID NO: 1716 - protein, 18 aa, Human papillomavirus
DPTAPSIVTGTDSTVDLL

SEQ ID NO: 1717 - protein, 18 aa, Human papillomavirus
PTAPSIVTGTDSTVDLLP

SEQ ID NO: 1718 - protein, 19 aa, Human papillomavirus
GPTDLIPLDTVRPIDPTAP

SEQ ID NO: 1719 - protein, 19 aa, Human papillomavirus
PTDLIPLDTVRPIDPTAPS

SEQ ID NO: 1720 - protein, 19 aa, Human papillomavirus
TDLIPLDTVRPIDPTAPSI

SEQ ID NO: 1721 - protein, 19 aa, Human papillomavirus
DLIPLDTVRPIDPTAPSIV

SEQ ID NO: 1722 - protein, 19 aa, Human papillomavirus
LIPLDTVRPIDPTAPSIVT

SEQ ID NO: 1723 - protein, 19 aa, Human papillomavirus
IPLDTVRPIDPTAPSIVTG

SEQ ID NO: 1724 - protein, 19 aa, Human papillomavirus
PLDTVRPIDPTAPSIVTGT

SEQ ID NO: 1725 - protein, 19 aa, Human papillomavirus
LDTVRPIDPTAPSIVTGTD

SEQ ID NO: 1726 - protein, 19 aa, Human papillomavirus
DTVRPIDPTAPSIVTGTDS

SEQ ID NO: 1727 - protein, 19 aa, Human papillomavirus
TVRPIDPTAPSIVTGTDST

SEQ ID NO: 1728 - protein, 19 aa, Human papillomavirus
VRPIDPTAPSIVTGTDSTV

SEQ ID NO: 1729 - protein, 19 aa, Human papillomavirus
RPIDPTAPSIVTGTDSTVD

SEQ ID NO: 1730 - protein, 19 aa, Human papillomavirus
PIDPTAPSIVTGTDSTVDL

SEQ ID NO: 1731 - protein, 19 aa, Human papillomavirus
IDPTAPSIVTGTDSTVDLL

SEQ ID NO: 1732 - protein, 19 aa, Human papillomavirus
DPTAPSIVTGTDSTVDLLP

SEQ ID NO: 1733 - protein, 19 aa, Human papillomavirus
PTAPSIVTGTDSTVDLLPG

SEQ ID NO: 1734 - protein, 20 aa, Human papillomavirus
IGPTDLIPLDTVRPIDPTAP

SEQ ID NO: 1735 - protein, 20 aa, Human papillomavirus
GPTDLIPLDTVRPIDPTAPS

SEQ ID NO: 1736 - protein, 20 aa, Human papillomavirus
PTDLIPLDTVRPIDPTAPSI

SEQ ID NO: 1737 - protein, 20 aa, Human papillomavirus
TDLIPLDTVRPIDPTAPSIV

SEQ ID NO: 1738 - protein, 20 aa, Human papillomavirus
DLIPLDTVRPIDPTAPSIVT

SEQ ID NO: 1739 - protein, 20 aa, Human papillomavirus
LIPLDTVRPIDPTAPSIVTG

SEQ ID NO: 1740 - protein, 20 aa, Human papillomavirus
IPLDTVRPIDPTAPSIVTGT

SEQ ID NO: 1741 - protein, 20 aa, Human papillomavirus
PLDTVRPIDPTAPSIVTGTD

SEQ ID NO: 1742 - protein, 20 aa, Human papillomavirus
LDTVRPIDPTAPSIVTGTDS

SEQ ID NO: 1743 - protein, 20 aa, Human papillomavirus
DTVRPIDPTAPSIVTGTDST

SEQ ID NO: 1744 - protein, 20 aa, Human papillomavirus
TVRPIDPTAPSIVTGTDSTV

SEQ ID NO: 1745 - protein, 20 aa, Human papillomavirus
VRPIDPTAPSIVTGTDSTVD

SEQ ID NO: 1746 - protein, 20 aa, Human papillomavirus
RPIDPTAPSIVTGTDSTVDL

SEQ ID NO: 1747 - protein, 20 aa, Human papillomavirus
PIDPTAPSIVTGTDSTVDLL

SEQ ID NO: 1748 - protein, 20 aa, Human papillomavirus
IDPTAPSIVTGTDSTVDLLP

SEQ ID NO: 1749 - protein, 20 aa, Human papillomavirus
DPTAPSIVTGTDSTVDLLPG

SEQ ID NO: 1750 - protein, 20 aa, Human papillomavirus
PTAPSIVTGTDSTVDLLPGE

SEQ ID NO: 1751 - protein, 8 aa, Human T-cell lymphotropic virus type 2
NQVSPSAP

SEQ ID NO: 1752 - protein, 8 aa, Human T-cell lymphotropic virus type 2
QVSPSAPA

SEQ ID NO: 1753 - protein, 8 aa, Human T-cell lymphotropic virus type 2
VSPSAPAA

SEQ ID NO: 1754 - protein, 8 aa, Human T-cell lymphotropic virus type 2
SPSAPAAP

SEQ ID NO: 1755 - protein, 8 aa, Human T-cell lymphotropic virus type 2
PSAPAAPV

SEQ ID NO: 1756 - protein, 9 aa, Human T-cell lymphotropic virus type 2
KNQVSPSAP

SEQ ID NO: 1757 - protein, 9 aa, Human T-cell lymphotropic virus type 2
NQVSPSAPA

SEQ ID NO: 1758 - protein, 9 aa, Human T-cell lymphotropic virus type 2
QVSPSAPAA

SEQ ID NO: 1759 - protein, 9 aa, Human T-cell lymphotropic virus type 2
VSPSAPAAP

SEQ ID NO: 1760 - protein, 9 aa, Human T-cell lymphotropic virus type 2
SPSAPAAPV

SEQ ID NO: 1761 - protein, 9 aa, Human T-cell lymphotropic virus type 2
PSAPAAPVP

SEQ ID NO: 1762 - protein, 10 aa, Human T-cell lymphotropic virus type 2
VKNQVSPSAP

SEQ ID NO: 1763 - protein, 10 aa, Human T-cell lymphotropic virus type 2
KNQVSPSAPA

SEQ ID NO: 1764 - protein, 10 aa, Human T-cell lymphotropic virus type 2
NQVSPSAPAA

SEQ ID NO: 1765 - protein, 10 aa, Human T-cell lymphotropic virus type 2
QVSPSAPAAP

SEQ ID NO: 1766 - protein, 10 aa, Human T-cell lymphotropic virus type 2
VSPSAPAAPV

SEQ ID NO: 1767 - protein, 10 aa, Human T-cell lymphotropic virus type 2
SPSAPAAPVP

SEQ ID NO: 1768 - protein, 10 aa, Human T-cell lymphotropic virus type 2
PSAPAAPVPT

SEQ ID NO: 1769 - protein, 11 aa, Human T-cell lymphotropic virus type 2
LVKNQVSPSAP

SEQ ID NO: 1770 - protein, 11 aa, Human T-cell lymphotropic virus type 2
VKNQVSPSAPA

SEQ ID NO: 1771 - protein, 11 aa, Human T-cell lymphotropic virus type 2
KNQVSPSAPAA

SEQ ID NO: 1772 - protein, 11 aa, Human T-cell lymphotropic virus type 2
NQVSPSAPAAP

SEQ ID NO: 1773 - protein, 11 aa, Human T-cell lymphotropic virus type 2
QVSPSAPAAPV

SEQ ID NO: 1774 - protein, 11 aa, Human T-cell lymphotropic virus type 2
VSPSAPAAPVP

SEQ ID NO: 1775 - protein, 11 aa, Human T-cell lymphotropic virus type 2
SPSAPAAPVPT

SEQ ID NO: 1776 - protein, 11 aa, Human T-cell lymphotropic virus type 2
PSAPAAPVPTP

SEQ ID NO: 1777 - protein, 12 aa, Human T-cell lymphotropic virus type 2
ILVKNQVSPSAP

SEQ ID NO: 1778 - protein, 12 aa, Human T-cell lymphotropic virus type 2
LVKNQVSPSAPA

SEQ ID NO: 1779 - protein, 12 aa, Human T-cell lymphotropic virus type 2
VKNQVSPSAPAA

SEQ ID NO: 1780 - protein, 12 aa, Human T-cell lymphotropic virus type 2
KNQVSPSAPAAP

SEQ ID NO: 1781 - protein, 12 aa, Human T-cell lymphotropic virus type 2
NQVSPSAPAAPV

SEQ ID NO: 1782 - protein, 13 aa, Human T-cell lymphotropic virus type 2
QVSPSAPAAPVPS

SEQ ID NO: 1783 - protein, 12 aa, Human T-cell lymphotropic virus type 2
VSPSAPAAPVPT

SEQ ID NO: 1784 - protein, 12 aa, Human T-cell lymphotropic virus type 2
SPSAPAAPVPTP

SEQ ID NO: 1785 - protein, 12 aa, Human T-cell lymphotropic virus type 2
PSAPAAPVPTPI

SEQ ID NO: 1786 - protein, 13 aa, Human T-cell lymphotropic virus type 2
NILVKNQVSPSAP

SEQ ID NO: 1787 - protein, 13 aa, Human T-cell lymphotropic virus type 2
ILVKNQVSPSAPA

SEQ ID NO: 1788 - protein, 13 aa, Human T-cell lymphotropic virus type 2
LVKNQVSPSAPAA

SEQ ID NO: 1789 - protein, 13 aa, Human T-cell lymphotropic virus type 2
VKNQVSPSAPAAP

SEQ ID NO: 1790 - protein, 13 aa, Human T-cell lymphotropic virus type 2
KNQVSPSAPAAPV

SEQ ID NO: 1791 - protein, 13 aa, Human T-cell lymphotropic virus type 2
NQVSPSAPAAPVP

SEQ ID NO: 1792 - protein, 13 aa, Human T-cell lymphotropic virus type 2
QVSPSAPAAPVPT

SEQ ID NO: 1793 - protein, 13 aa, Human T-cell lymphotropic virus type 2
VSPSAPAAPVPTP

SEQ ID NO: 1794 - protein, 13 aa, Human T-cell lymphotropic virus type 2
SPSAPAAPVPTPI

SEQ ID NO: 1795 - protein, 13 aa, Human T-cell lymphotropic virus type 2
PSAPAAPVPTPIC

SEQ ID NO: 1796 - protein, 14 aa, Human T-cell lymphotropic virus type 2
INILVKNQVSPSAP

SEQ ID NO: 1797 - protein, 14 aa, Human T-cell lymphotropic virus type 2
NILVKNQVSPSAPA

SEQ ID NO: 1798 - protein, 14 aa, Human T-cell lymphotropic virus type 2
ILVKNQVSPSAPAA

SEQ ID NO: 1799 - protein, 14 aa, Human T-cell lymphotropic virus type 2
LVKNQVSPSAPAAP

SEQ ID NO: 1800 - protein, 14 aa, Human T-cell lymphotropic virus type 2
VKNQVSPSAPAAPV

SEQ ID NO: 1801 - protein, 14 aa, Human T-cell lymphotropic virus type 2
KNQVSPSAPAAPVP

SEQ ID NO: 1802 - protein, 14 aa, Human T-cell lymphotropic virus type 2
NQVSPSAPAAPVPT

SEQ ID NO: 1803 - protein, 14 aa, Human T-cell lymphotropic virus type 2
QVSPSAPAAPVPTP

SEQ ID NO: 1804 - protein, 14 aa, Human T-cell lymphotropic virus type 2
VSPSAPAAPVPTPI

SEQ ID NO: 1805 - protein, 14 aa, Human T-cell lymphotropic virus type 2
SPSAPAAPVPTPIC

SEQ ID NO: 1806 - protein, 14 aa, Human T-cell lymphotropic virus type 2
PSAPAAPVPTPICP

SEQ ID NO: 1807 - protein, 15 aa, Human T-cell lymphotropic virus type 2
IINILVKNQVSPSAP

SEQ ID NO: 1808 - protein, 15 aa, Human T-cell lymphotropic virus type 2
INILVKNQVSPSAPA

SEQ ID NO: 1809 - protein, 15 aa, Human T-cell lymphotropic virus type 2
NILVKNQVSPSAPAA

SEQ ID NO: 1810 - protein, 15 aa, Human T-cell lymphotropic virus type 2
ILVKNQVSPSAPAAP

SEQ ID NO: 1811 - protein, 15 aa, Human T-cell lymphotropic virus type 2
LVKNQVSPSAPAAPV

SEQ ID NO: 1812 - protein, 15 aa, Human T-cell lymphotropic virus type 2
VKNQVSPSAPAAPVP

SEQ ID NO: 1813 - protein, 15 aa, Human T-cell lymphotropic virus type 2
KNQVSPSAPAAPVPT

SEQ ID NO: 1814 - protein, 15 aa, Human T-cell lymphotropic virus type 2
NQVSPSAPAAPVPTP

SEQ ID NO: 1815 - protein, 15 aa, Human T-cell lymphotropic virus type 2
QVSPSAPAAPVPTPI

SEQ ID NO: 1816 - protein, 15 aa, Human T-cell lymphotropic virus type 2
VSPSAPAAPVPTPIC

SEQ ID NO: 1817 - protein, 15 aa, Human T-cell lymphotropic virus type 2
SPSAPAAPVPTPICP

SEQ ID NO: 1818 - protein, 15 aa, Human T-cell lymphotropic virus type 2
PSAPAAPVPTPICPT

SEQ ID NO: 1819 - protein, 16 aa, Human T-cell lymphotropic virus type 2
EIINILVKNQVSPSAP

SEQ ID NO: 1820 - protein, 16 aa, Human T-cell lymphotropic virus type 2
IINILVKNQVSPSAPA

SEQ ID NO: 1821 - protein, 16 aa, Human T-cell lymphotropic virus type 2
INILVKNQVSPSAPAA

SEQ ID NO: 1822 - protein, 16 aa, Human T-cell lymphotropic virus type 2
NILVKNQVSPSAPAAP

SEQ ID NO: 1823 - protein, 16 aa, Human T-cell lymphotropic virus type 2
ILVKNQVSPSAPAAPV

SEQ ID NO: 1824 - protein, 16 aa, Human T-cell lymphotropic virus type 2
LVKNQVSPSAPAAPVP

SEQ ID NO: 1825 - protein, 16 aa, Human T-cell lymphotropic virus type 2
VKNQVSPSAPAAPVPT

SEQ ID NO: 1826 - protein, 16 aa, Human T-cell lymphotropic virus type 2
KNQVSPSAPAAPVPTP

SEQ ID NO: 1827 - protein, 16 aa, Human T-cell lymphotropic virus type 2
NQVSPSAPAAPVPTPI

SEQ ID NO: 1828 - protein, 16 aa, Human T-cell lymphotropic virus type 2
QVSPSAPAAPVPTPIC

SEQ ID NO: 1829 - protein, 16 aa, Human T-cell lymphotropic virus type 2
VSPSAPAAPVPTPICP

SEQ ID NO: 1830 - protein, 16 aa, Human T-cell lymphotropic virus type 2
SPSAPAAPVPTPICPT

SEQ ID NO: 1831 - protein, 16 aa, Human T-cell lymphotropic virus type 2
PSAPAAPVPTPICPTT

SEQ ID NO: 1832 - protein, 17 aa, Human T-cell lymphotropic virus type 2
VEIINILVKNQVSPSAP

SEQ ID NO: 1833 - protein, 17 aa, Human T-cell lymphotropic virus type 2
EIINILVKNQVSPSAPA

SEQ ID NO: 1834 - protein, 17 aa, Human T-cell lymphotropic virus type 2
IINILVKNQVSPSAPAA

SEQ ID NO: 1835 - protein, 17 aa, Human T-cell lymphotropic virus type 2
INILVKNQVSPSAPAAP

SEQ ID NO: 1836 - protein, 17 aa, Human T-cell lymphotropic virus type 2
NILVKNQVSPSAPAAPV

SEQ ID NO: 1837 - protein, 17 aa, Human T-cell lymphotropic virus type 2
ILVKNQVSPSAPAAPVP

SEQ ID NO: 1838 - protein, 17 aa, Human T-cell lymphotropic virus type 2
LVKNQVSPSAPAAPVPT

SEQ ID NO: 1839 - protein, 17 aa, Human T-cell lymphotropic virus type 2
VKNQVSPSAPAAPVPTP

SEQ ID NO: 1840 - protein, 17 aa, Human T-cell lymphotropic virus type 2
KNQVSPSAPAAPVPTPI

SEQ ID NO: 1841 - protein, 17 aa, Human T-cell lymphotropic virus type 2
NQVSPSAPAAPVPTPIC

SEQ ID NO: 1842 - protein, 17 aa, Human T-cell lymphotropic virus type 2
QVSPSAPAAPVPTPICP

SEQ ID NO: 1843 - protein, 17 aa, Human T-cell lymphotropic virus type 2
VSPSAPAAPVPTPICPT

SEQ ID NO: 1844 - protein, 17 aa, Human T-cell lymphotropic virus type 2
SPSAPAAPVPTPICPTT

SEQ ID NO: 1845 - protein, 17 aa, Human T-cell lymphotropic virus type 2
PSAPAAPVPTPICPTTT

SEQ ID NO: 1846 - protein, 18 aa, Human T-cell lymphotropic virus type 2
VVEIINILVKNQVSPSAP

SEQ ID NO: 1847 - protein, 18 aa, Human T-cell lymphotropic virus type 2
VEIINILVKNQVSPSAPA

SEQ ID NO: 1848 - protein, 18 aa, Human T-cell lymphotropic virus type 2
EIINILVKNQVSPSAPAA

SEQ ID NO: 1849 - protein, 18 aa, Human T-cell lymphotropic virus type 2
IINILVKNQVSPSAPAAP

SEQ ID NO: 1850 - protein, 18 aa, Human T-cell lymphotropic virus type 2
INILVKNQVSPSAPAAPV

SEQ ID NO: 1851 - protein, 18 aa, Human T-cell lymphotropic virus type 2
NILVKNQVSPSAPAAPVP

SEQ ID NO: 1852 - protein, 18 aa, Human T-cell lymphotropic virus type 2
ILVKNQVSPSAPAAPVPT

SEQ ID NO: 1853 - protein, 18 aa, Human T-cell lymphotropic virus type 2
LVKNQVSPSAPAAPVPTP

SEQ ID NO: 1854 - protein, 18 aa, Human T-cell lymphotropic virus type 2
VKNQVSPSAPAAPVPTPI

SEQ ID NO: 1855 - protein, 18 aa, Human T-cell lymphotropic virus type 2
KNQVSPSAPAAPVPTPIC

SEQ ID NO: 1856 - protein, 18 aa, Human T-cell lymphotropic virus type 2
NQVSPSAPAAPVPTPICP

SEQ ID NO: 1857 - protein, 18 aa, Human T-cell lymphotropic virus type 2
QVSPSAPAAPVPTPICPT

SEQ ID NO: 1858 - protein, 18 aa, Human T-cell lymphotropic virus type 2
VSPSAPAAPVPTPICPTT

SEQ ID NO: 1859 - protein, 18 aa, Human T-cell lymphotropic virus type 2
SPSAPAAPVPTPICPTTT

SEQ ID NO: 1860 - protein, 18 aa, Human T-cell lymphotropic virus type 2
PSAPAAPVPTPICPTTTP

SEQ ID NO: 1861 - protein, 19 aa, Human T-cell lymphotropic virus type 2
RVVEIINILVKNQVSPSAP

SEQ ID NO: 1862 - protein, 19 aa, Human T-cell lymphotropic virus type 2
VVEIINILVKNQVSPSAPA

SEQ ID NO: 1863 - protein, 19 aa, Human T-cell lymphotropic virus type 2
VEIINILVKNQVSPSAPAA

SEQ ID NO: 1864 - protein, 19 aa, Human T-cell lymphotropic virus type 2
EIINILVKNQVSPSAPAAP

SEQ ID NO: 1865 - protein, 19 aa, Human T-cell lymphotropic virus type 2
IINILVKNQVSPSAPAAPV

SEQ ID NO: 1866 - protein, 19 aa, Human T-cell lymphotropic virus type 2
INILVKNQVSPSAPAAPVP

SEQ ID NO: 1867 - protein, 19 aa, Human T-cell lymphotropic virus type 2
NILVKNQVSPSAPAAPVPT

SEQ ID NO: 1868 - protein, 19 aa, Human T-cell lymphotropic virus type 2
ILVKNQVSPSAPAAPVPTP

SEQ ID NO: 1869 - protein, 19 aa, Human T-cell lymphotropic virus type 2
LVKNQVSPSAPAAPVPTPI

SEQ ID NO: 1870 - protein, 19 aa, Human T-cell lymphotropic virus type 2
VKNQVSPSAPAAPVPTPIC

SEQ ID NO: 1871 - protein, 19 aa, Human T-cell lymphotropic virus type 2
KNQVSPSAPAAPVPTPICP

SEQ ID NO: 1872 - protein, 19 aa, Human T-cell lymphotropic virus type 2
NQVSPSAPAAPVPTPICPT

SEQ ID NO: 1873 - protein, 19 aa, Human T-cell lymphotropic virus type 2
QVSPSAPAAPVPTPICPTT

SEQ ID NO: 1874 - protein, 19 aa, Human T-cell lymphotropic virus type 2
VSPSAPAAPVPTPICPTTT

SEQ ID NO: 1875 - protein, 19 aa, Human T-cell lymphotropic virus type 2
SPSAPAAPVPTPICPTTTP

SEQ ID NO: 1876 - protein, 19 aa, Human T-cell lymphotropic virus type 2
PSAPAAPVPTPICPTTTPP

SEQ ID NO: 1877 - protein, 20 aa, Human T-cell lymphotropic virus type 2
GRVVEIINILVKNQVSPSAP

SEQ ID NO: 1878 - protein, 20 aa, Human T-cell lymphotropic virus type 2
RVVEIINILVKNQVSPSAPA

SEQ ID NO: 1879 - protein, 20 aa, Human T-cell lymphotropic virus type 2
VVEIINILVKNQVSPSAPAA

SEQ ID NO: 1880 - protein, 20 aa, Human T-cell lymphotropic virus type 2
VEIINILVKNQVSPSAPAAP

SEQ ID NO: 1881 - protein, 20 aa, Human T-cell lymphotropic virus type 2
EIINILVKNQVSPSAPAAPV

SEQ ID NO: 1882 - protein, 20 aa, Human T-cell lymphotropic virus type 2
IINILVKNQVSPSAPAAPVP

SEQ ID NO: 1883 - protein, 20 aa, Human T-cell lymphotropic virus type 2
INILVKNQVSPSAPAAPVPT

SEQ ID NO: 1884 - protein, 20 aa, Human T-cell lymphotropic virus type 2
NILVKNQVSPSAPAAPVPTP

SEQ ID NO: 1885 - protein, 20 aa, Human T-cell lymphotropic virus type 2
ILVKNQVSPSAPAAPVPTPI

SEQ ID NO: 1886 - protein, 20 aa, Human T-cell lymphotropic virus type 2
LVKNQVSPSAPAAPVPTPIC

SEQ ID NO: 1887 - protein, 20 aa, Human T-cell lymphotropic virus type 2
VKNQVSPSAPAAPVPTPICP

SEQ ID NO: 1888 - protein, 20 aa, Human T-cell lymphotropic virus type 2
KNQVSPSAPAAPVPTPICPT

SEQ ID NO: 1889 - protein, 20 aa, Human T-cell lymphotropic virus type 2
NQVSPSAPAAPVPTPICPTT

SEQ ID NO: 1890 - protein, 20 aa, Human T-cell lymphotropic virus type 2
QVSPSAPAAPVPTPICPTTT

SEQ ID NO: 1891 - protein, 20 aa, Human T-cell lymphotropic virus type 2
VSPSAPAAPVPTPICPTTTP

SEQ ID NO: 1892 - protein, 20 aa, Human T-cell lymphotropic virus type 2
SPSAPAAPVPTPICPTTTPP

SEQ ID NO: 1893 - protein, 20 aa, Human T-cell lymphotropic virus type 2
PSAPAAPVPTPICPTTTPPP

SEQ ID NO: 1894 - protein, 8 aa, West Nile virus
FSITPSAP

SEQ ID NO: 1895 - protein, 8 aa, West Nile virus
SITPSAPS

SEQ ID NO: 1896 - protein, 8 aa, West Nile virus
ITPSAPSY

SEQ ID NO: 1897 - protein, 8 aa, West Nile virus
TPSAPSYT

SEQ ID NO: 1898 - protein, 8 aa, West Nile virus
PSAPSYTL

SEQ ID NO: 1899 - protein, 9 aa, West Nile virus
RFSITPSAP

SEQ ID NO: 1900 - protein, 9 aa, West Nile virus
FSITPSAPS

SEQ ID NO: 1901 - protein, 9 aa, West Nile virus
SITPSAPSY

SEQ ID NO: 1902 - protein, 9 aa, West Nile virus
ITPSAPSYT

SEQ ID NO: 1903 - protein, 9 aa, West Nile virus
TPSAPSYTL

SEQ ID NO: 1904 - protein, 9 aa, West Nile virus
PSAPSYTLK

SEQ ID NO: 1905 - protein, 10 aa, West Nile virus
GRFSITPSAP

SEQ ID NO: 1906 - protein, 10 aa, West Nile virus
RFSITPSAPS

SEQ ID NO: 1907 - protein, 10 aa, West Nile virus
FSITPSAPSY

SEQ ID NO: 1908 - protein, 10 aa, West Nile virus
SITPSAPSYT

SEQ ID NO: 1909 - protein, 10 aa, West Nile virus
ITPSAPSYTL

SEQ ID NO: 1910 - protein, 10 aa, West Nile virus
TPSAPSYTLK

SEQ ID NO: 1911 - protein, 10 aa, West Nile virus
PSAPSYTLKL

SEQ ID NO: 1912 - protein, 11 aa, West Nile virus
AGRFSITPSAP

SEQ ID NO: 1913 - protein, 11 aa, West Nile virus
GRFSITPSAPS

SEQ ID NO: 1914 - protein, 11 aa, West Nile virus
RFSITPSAPSY

SEQ ID NO: 1915 - protein, 11 aa, West Nile virus
FSITPSAPSYT

SEQ ID NO: 1916 - protein, 11 aa, West Nile virus
SITPSAPSYTL

SEQ ID NO: 1917 - protein, 11 aa, West Nile virus
ITPSAPSYTLK

SEQ ID NO: 1918 - protein, 11 aa, West Nile virus
TPSAPSYTLKL

SEQ ID NO: 1919 - protein, 11 aa, West Nile virus
PSAPSYTLKLG

SEQ ID NO: 1920 - protein, 12 aa, West Nile virus
QAGRFSITPSAP

SEQ ID NO: 1921 - protein, 12 aa, West Nile virus
AGRFSITPSAPS

SEQ ID NO: 1922 - protein, 12 aa, West Nile virus
GRFSITPSAPSY

SEQ ID NO: 1923 - protein, 12 aa, West Nile virus
RFSITPSAPSYT

SEQ ID NO: 1924 - protein, 12 aa, West Nile virus
FSITPSAPSYTL

SEQ ID NO: 1925 - protein, 12 aa, West Nile virus
SITPSAPSYTLK

SEQ ID NO: 1926 - protein, 12 aa, West Nile virus
ITPSAPSYTLKL

SEQ ID NO: 1927 - protein, 12 aa, West Nile virus
TPSAPSYTLKLG

SEQ ID NO: 1928 - protein, 12 aa, West Nile virus
PSAPSYTLKLGE

SEQ ID NO: 1929 - protein, 13 aa, West Nile virus
TQAGRFSITPSAP

SEQ ID NO: 1930 - protein, 13 aa, West Nile virus
QAGRFSITPSAPS

SEQ ID NO: 1931 - protein, 13 aa, West Nile virus
AGRFSITPSAPSY

SEQ ID NO: 1932 - protein, 13 aa, West Nile virus
GRFSITPSAPSYT

SEQ ID NO: 1933 - protein, 13 aa, West Nile virus
RFSITPSAPSYTL

SEQ ID NO: 1934 - protein, 13 aa, West Nile virus
FSITPSAPSYTLK

SEQ ID NO: 1935 - protein, 13 aa, West Nile virus
SITPSAPSYTLKL

SEQ ID NO: 1936 - protein, 13 aa, West Nile virus
ITPSAPSYTLKLG

SEQ ID NO: 1937 - protein, 13 aa, West Nile virus
TPSAPSYTLKLGE

SEQ ID NO: 1938 - protein, 13 aa, West Nile virus
PSAPSYTLKLGEY

SEQ ID NO: 1939 - protein, 14 aa, West Nile virus
ATQAGRFSITPSAP

SEQ ID NO: 1940 - protein, 14 aa, West Nile virus
TQAGRFSITPSAPS

SEQ ID NO: 1941 - protein, 14 aa, West Nile virus
QAGRFSITPSAPSY

SEQ ID NO: 1942 - protein, 14 aa, West Nile virus
AGRFSITPSAPSYT

SEQ ID NO: 1943 - protein, 14 aa, West Nile virus
GRFSITPSAPSYTL

SEQ ID NO: 1944 - protein, 14 aa, West Nile virus
RFSITPSAPSYTLK

SEQ ID NO: 1945 - protein, 14 aa, West Nile virus
FSITPSAPSYTLKL

SEQ ID NO: 1946 - protein, 14 aa, West Nile virus
SITPSAPSYTLKLG

SEQ ID NO: 1947 - protein, 14 aa, West Nile virus
ITPSAPSYTLKLGE

SEQ ID NO: 1948 - protein, 14 aa, West Nile virus
TPSAPSYTLKLGEY

SEQ ID NO: 1949 - protein, 14 aa, West Nile virus
PSAPSYTLKLGEYG

SEQ ID NO: 1950 - protein, 15 aa, West Nile virus
GATQAGRFSITPSAP

SEQ ID NO: 1951 - protein, 15 aa, West Nile virus
ATQAGRFSITPSAPS

SEQ ID NO: 1952 - protein, 15 aa, West Nile virus
TQAGRFSITPSAPSY

SEQ ID NO: 1953 - protein, 15 aa, West Nile virus
QAGRFSITPSAPSYT

SEQ ID NO: 1954 - protein, 15 aa, West Nile virus
AGRFSITPSAPSYTL

SEQ ID NO: 1955 - protein, 15 aa, West Nile virus
GRFSITPSAPSYTLK

SEQ ID NO: 1956 - protein, 15 aa, West Nile virus
RFSITPSAPSYTLKL

SEQ ID NO: 1957 - protein, 15 aa, West Nile virus
FSITPSAPSYTLKLG

SEQ ID NO: 1958 - protein, 15 aa, West Nile virus
SITPSAPSYTLKLGE

SEQ ID NO: 1959 - protein, 15 aa, West Nile virus
ITPSAPSYTLKLGEY

SEQ ID NO: 1960 - protein, 15 aa, West Nile virus
TPSAPSYTLKLGEYG

SEQ ID NO: 1961 - protein, 15 aa, West Nile virus
PSAPSYTLKLGEYGE

SEQ ID NO: 1962 - protein, 16 aa, West Nile virus
IGATQAGRFSITPSAP

SEQ ID NO: 1963 - protein, 16 aa, West Nile virus
GATQAGRFSITPSAPS

SEQ ID NO: 1964 - protein, 16 aa, West Nile virus
ATQAGRFSITPSAPSY

SEQ ID NO: 1965 - protein, 16 aa, West Nile virus
TQAGRFSITPSAPSYT

SEQ ID NO: 1966 - protein, 16 aa, West Nile virus
QAGRFSITPSAPSYTL

SEQ ID NO: 1967 - protein, 16 aa, West Nile virus
AGRFSITPSAPSYTLK

SEQ ID NO: 1968 - protein, 16 aa, West Nile virus
GRFSITPSAPSYTLKL

SEQ ID NO: 1969 - protein, 16 aa, West Nile virus
RFSITPSAPSYTLKLG

SEQ ID NO: 1970 - protein, 16 aa, West Nile virus
FSITPSAPSYTLKLGE

SEQ ID NO: 1971 - protein, 16 aa, West Nile virus
SITPSAPSYTLKLGEY

SEQ ID NO: 1972 - protein, 16 aa, West Nile virus
ITPSAPSYTLKLGEYG

SEQ ID NO: 1973 - protein, 16 aa, West Nile virus
TPSAPSYTLKLGEYGE

SEQ ID NO: 1974 - protein, 16 aa, West Nile virus
PSAPSYTLKLGEYGEV

SEQ ID NO: 1975 - protein, 17 aa, West Nile virus
KIGATQAGRFSITPSAP

SEQ ID NO: 1976 - protein, 17 aa, West Nile virus
IGATQAGRFSITPSAPS

SEQ ID NO: 1977 - protein, 17 aa, West Nile virus
GATQAGRFSITPSAPSY

SEQ ID NO: 1978 - protein, 17 aa, West Nile virus
ATQAGRFSITPSAPSYT

SEQ ID NO: 1979 - protein, 17 aa, West Nile virus
TQAGRFSITPSAPSYTL

SEQ ID NO: 1980 - protein, 17 aa, West Nile virus
QAGRFSITPSAPSYTLK

SEQ ID NO: 1981 - protein, 17 aa, West Nile virus
AGRFSITPSAPSYTLKL

SEQ ID NO: 1982 - protein, 17 aa, West Nile virus
GRFSITPSAPSYTLKLG

SEQ ID NO: 1983 - protein, 17 aa, West Nile virus
RFSITPSAPSYTLKLGE

SEQ ID NO: 1984 - protein, 17 aa, West Nile virus
FSITPSAPSYTLKLGEY

SEQ ID NO: 1985 - protein, 17 aa, West Nile virus
SITPSAPSYTLKLGEYG

SEQ ID NO: 1986 - protein, 17 aa, West Nile virus
ITPSAPSYTLKLGEYGE

SEQ ID NO: 1987 - protein, 17 aa, West Nile virus
TPSAPSYTLKLGEYGEV

SEQ ID NO: 1988 - protein, 17 aa, West Nile virus
PSAPSYTLKLGEYGEVT

SEQ ID NO: 1989 - protein, 18 aa, West Nile virus
GKIGATQAGRFSITPSAP

SEQ ID NO: 1990 - protein, 18 aa, West Nile virus
KIGATQAGRFSITPSAPS

SEQ ID NO: 1991 - protein, 18 aa, West Nile virus
IGATQAGRFSITPSAPSY

SEQ ID NO: 1992 - protein, 18 aa, West Nile virus
GATQAGRFSITPSAPSYT

SEQ ID NO: 1993 - protein, 18 aa, West Nile virus
ATQAGRFSITPSAPSYTL

SEQ ID NO: 1994 - protein, 18 aa, West Nile virus
TQAGRFSITPSAPSYTLK

SEQ ID NO: 1995 - protein, 18 aa, West Nile virus
QAGRFSITPSAPSYTLKL

SEQ ID NO: 1996 - protein, 18 aa, West Nile virus
AGRFSITPSAPSYTLKLG

SEQ ID NO: 1997 - protein, 18 aa, West Nile virus
GRFSITPSAPSYTLKLGE

SEQ ID NO: 1998 - protein, 18 aa, West Nile virus
RFSITPSAPSYTLKLGEY

SEQ ID NO: 1999 - protein, 18 aa, West Nile virus
FSITPSAPSYTLKLGEYG

SEQ ID NO: 2000 - protein, 18 aa, West Nile virus
SITPSAPSYTLKLGEYGE

SEQ ID NO: 2001 - protein, 18 aa, West Nile virus
ITPSAPSYTLKLGEYGEV

SEQ ID NO: 2002 - protein, 18 aa, West Nile virus
TPSAPSYTLKLGEYGEVT

SEQ ID NO: 2003 - protein, 18 aa, West Nile virus
PSAPSYTLKLGEYGEVTV

SEQ ID NO: 2004 - protein, 19 aa, West Nile virus
HGKIGATQAGRFSITPSAP

SEQ ID NO: 2005 - protein, 19 aa, West Nile virus
GKIGATQAGRFSITPSAPS

SEQ ID NO: 2006 - protein, 19 aa, West Nile virus
KIGATQAGRFSITPSAPSY

SEQ ID NO: 2007 - protein, 19 aa, West Nile virus
IGATQAGRFSITPSAPSYT

SEQ ID NO: 2008 - protein, 19 aa, West Nile virus
GATQAGRFSITPSAPSYTL

SEQ ID NO: 2009 - protein, 19 aa, West Nile virus
ATQAGRFSITPSAPSYTLK

SEQ ID NO: 2010 - protein, 19 aa, West Nile virus
TQAGRFSITPSAPSYTLKL

SEQ ID NO: 2011 - protein, 19 aa, West Nile virus
QAGRFSITPSAPSYTLKLG

SEQ ID NO: 2012 - protein, 19 aa, West Nile virus
AGRFSITPSAPSYTLKLGE

SEQ ID NO: 2013 - protein, 19 aa, West Nile virus
GRFSITPSAPSYTLKLGEY

SEQ ID NO: 2014 - protein, 19 aa, West Nile virus
RFSITPSAPSYTLKLGEYG

SEQ ID NO: 2015 - protein, 19 aa, West Nile virus
FSITPSAPSYTLKLGEYGE

SEQ ID NO: 2016 - protein, 19 aa, West Nile virus
SITPSAPSYTLKLGEYGEV

SEQ ID NO: 2017 - protein, 19 aa, West Nile virus
ITPSAPSYTLKLGEYGEVT

SEQ ID NO: 2018 - protein, 19 aa, West Nile virus
TPSAPSYTLKLGEYGEVTV

SEQ ID NO: 2019 - protein, 19 aa, West Nile virus
PSAPSYTLKLGEYGEVTVD

SEQ ID NO: 2020 - protein, 20 aa, West Nile virus
SHGKIGATQAGRFSITPSAP

SEQ ID NO: 2021 - protein, 20 aa, West Nile virus
HGKIGATQAGRFSITPSAPS

SEQ ID NO: 2022 - protein, 20 aa, West Nile virus
GKIGATQAGRFSITPSAPSY

SEQ ID NO: 2023 - protein, 20 aa, West Nile virus
KIGATQAGRFSITPSAPSYT

SEQ ID NO: 2024 - protein, 20 aa, West Nile virus
IGATQAGRFSITPSAPSYTL

SEQ ID NO: 2025 - protein, 20 aa, West Nile virus
GATQAGRFSITPSAPSYTLK

SEQ ID NO: 2026 - protein, 20 aa, West Nile virus
ATQAGRFSITPSAPSYTLKL

SEQ ID NO: 2027 - protein, 20 aa, West Nile virus
TQAGRFSITPSAPSYTLKLG

SEQ ID NO: 2028 - protein, 20 aa, West Nile virus
QAGRFSITPSAPSYTLKLGE

SEQ ID NO: 2029 - protein, 20 aa, West Nile virus
AGRFSITPSAPSYTLKLGEY

SEQ ID NO: 2030 - protein, 20 aa, West Nile virus
GRFSITPSAPSYTLKLGEYG

SEQ ID NO: 2031 - protein, 20 aa, West Nile virus
RFSITPSAPSYTLKLGEYGE

SEQ ID NO: 2032 - protein, 20 aa, West Nile virus
FSITPSAPSYTLKLGEYGEV

SEQ ID NO: 2033 - protein, 20 aa, West Nile virus
SITPSAPSYTLKLGEYGEVT

SEQ ID NO: 2034 - protein, 20 aa, West Nile virus
ITPSAPSYTLKLGEYGEVTV

SEQ ID NO: 2035 - protein, 20 aa, West Nile virus
TPSAPSYTLKLGEYGEVTVD

SEQ ID NO: 2036 - protein, 20 aa, West Nile virus
PSAPSYTLKLGEYGEVTVDC

SEQ ID NO: 2037 - protein, 8 aa, Measles virus
AAPQPSAP

SEQ ID NO: 2038 - protein, 8 aa, Measles virus
APQPSAPQ

SEQ ID NO: 2039 - protein, 8 aa, Measles virus
PQPSAPQE

SEQ ID NO: 2040 - protein, 8 aa, Measles virus
QPSAPQEP

SEQ ID NO: 2041 - protein, 8 aa, Measles virus
PSAPQEPR

SEQ ID NO: 2042 - protein, 9 aa, Measles virus
QAAPQPSAP

SEQ ID NO: 2043 - protein, 9 aa, Measles virus
AAPQPSAPQ

SEQ ID NO: 2044 - protein, 9 aa, Measles virus
APQPSAPQE

SEQ ID NO: 2045 - protein, 9 aa, Measles virus
PQPSAPQEP

SEQ ID NO: 2046 - protein, 9 aa, Measles virus
QPSAPQEPR

SEQ ID NO: 2047 - protein, 9 aa, Measles virus
PSAPQEPRT

SEQ ID NO: 2048 - protein, 10 aa, Measles virus
IQAAPQPSAP

SEQ ID NO: 2049 - protein, 10 aa, Measles virus
QAAPQPSAPQ

SEQ ID NO: 2050 - protein, 10 aa, Measles virus
AAPQPSAPQE

SEQ ID NO: 2051 - protein, 10 aa, Measles virus
APQPSAPQEP

SEQ ID NO: 2052 - protein, 10 aa, Measles virus
PQPSAPQEPR

SEQ ID NO: 2053 - protein, 10 aa, Measles virus
QPSAPQEPRT

SEQ ID NO: 2054 - protein, 10 aa, Measles virus
PSAPQEPRTH

SEQ ID NO: 2055 - protein, 11 aa, Measles virus
RIQAAPQPSAP

SEQ ID NO: 2056 - protein, 11 aa, Measles virus
IQAAPQPSAPQ

SEQ ID NO: 2057 - protein, 11 aa, Measles virus
QAAPQPSAPQE

SEQ ID NO: 2058 - protein, 11 aa, Measles virus
AAPQPSAPQEP

SEQ ID NO: 2059 - protein, 11 aa, Measles virus
APQPSAPQEPR

SEQ ID NO: 2060 - protein, 11 aa, Measles virus
PQPSAPQEPRT

SEQ ID NO: 2061 - protein, 11 aa, Measles virus
QPSAPQEPRTH

SEQ ID NO: 2062 - protein, 11 aa, Measles virus
PSAPQEPRTHD

SEQ ID NO: 2063 - protein, 12 aa, Measles virus
ARIQAAPQPSAP

SEQ ID NO: 2064 - protein, 12 aa, Measles virus
RIQAAPQPSAPQ

SEQ ID NO: 2065 - protein, 12 aa, Measles virus
IQAAPQPSAPQE

SEQ ID NO: 2066 - protein, 12 aa, Measles virus
QAAPQPSAPQEP

SEQ ID NO: 2067 - protein, 12 aa, Measles virus
AAPQPSAPQEPR

SEQ ID NO: 2068 - protein, 12 aa, Measles virus
APQPSAPQEPRT

SEQ ID NO: 2069 - protein, 12 aa, Measles virus
PQPSAPQEPRTH

SEQ ID NO: 2070 - protein, 12 aa, Measles virus
QPSAPQEPRTHD

SEQ ID NO: 2071 - protein, 12 aa, Measles virus
PSAPQEPRTHDD

SEQ ID NO: 2072 - protein, 13 aa, Measles virus
TARIQAAPQPSAP

SEQ ID NO: 2073 - protein, 13 aa, Measles virus
ARIQAAPQPSAPQ

SEQ ID NO: 2074 - protein, 13 aa, Measles virus
RIQAAPQPSAPQE

SEQ ID NO: 2075 - protein, 13 aa, Measles virus
IQAAPQPSAPQEP

SEQ ID NO: 2076 - protein, 13 aa, Measles virus
QAAPQPSAPQEPR

SEQ ID NO: 2077 - protein, 13 aa, Measles virus
AAPQPSAPQEPRT

SEQ ID NO: 2078 - protein, 13 aa, Measles virus
APQPSAPQEPRTH

SEQ ID NO: 2079 - protein, 13 aa, Measles virus
PQPSAPQEPRTHD

SEQ ID NO: 2080 - protein, 13 aa, Measles virus
QPSAPQEPRTHDD

SEQ ID NO: 2081 - protein, 13 aa, Measles virus
PSAPQEPRTHDDA

SEQ ID NO: 2082 - protein, 14 aa, Measles virus
KTARIQAAPQPSAP

SEQ ID NO: 2083 - protein, 14 aa, Measles virus
TARIQAAPQPSAPQ

SEQ ID NO: 2084 - protein, 14 aa, Measles virus
ARIQAAPQPSAPQE

SEQ ID NO: 2085 - protein, 14 aa, Measles virus
RIQAAPQPSAPQEP

SEQ ID NO: 2086 - protein, 14 aa, Measles virus
IQAAPQPSAPQEPR

SEQ ID NO: 2087 - protein, 14 aa, Measles virus
QAAPQPSAPQEPRT

SEQ ID NO: 2088 - protein, 14 aa, Measles virus
AAPQPSAPQEPRTH

SEQ ID NO: 2089 - protein, 14 aa, Measles virus
APQPSAPQEPRTHD

SEQ ID NO: 2090 - protein, 14 aa, Measles virus
PQPSAPQEPRTHDD

SEQ ID NO: 2091 - protein, 14 aa, Measles virus
QPSAPQEPRTHDDA

SEQ ID NO: 2092 - protein, 14 aa, Measles virus
PSAPQEPRTHDDAI

SEQ ID NO: 2093 - protein, 15 aa, Measles virus
RKTARIQAAPQPSAP

SEQ ID NO: 2094 - protein, 15 aa, Measles virus
KTARIQAAPQPSAPQ

SEQ ID NO: 2095 - protein, 15 aa, Measles virus
TARIQAAPQPSAPQE

SEQ ID NO: 2096 - protein, 15 aa, Measles virus
ARIQAAPQPSAPQEP

SEQ ID NO: 2097 - protein, 15 aa, Measles virus
RIQAAPQPSAPQEPR

SEQ ID NO: 2098 - protein, 15 aa, Measles virus
IQAAPQPSAPQEPRT

SEQ ID NO: 2099 - protein, 15 aa, Measles virus
QAAPQPSAPQEPRTH

SEQ ID NO: 2100 - protein, 15 aa, Measles virus
AAPQPSAPQEPRTHD

SEQ ID NO: 2101 - protein, 15 aa, Measles virus
APQPSAPQEPRTHDD

SEQ ID NO: 2102 - protein, 15 aa, Measles virus
PQPSAPQEPRTHDDA

SEQ ID NO: 2103 - protein, 15 aa, Measles virus
QPSAPQEPRTHDDAI

SEQ ID NO: 2104 - protein, 15 aa, Measles virus
PSAPQEPRTHDDAIT

SEQ ID NO: 2105 - protein, 16 aa, Measles virus
RRKTARIQAAPQPSAP

SEQ ID NO: 2106 - protein, 16 aa, Measles virus
RKTARIQAAPQPSAPQ

SEQ ID NO: 2107 - protein, 16 aa, Measles virus
KTARIQAAPQPSAPQE

SEQ ID NO: 2108 - protein, 16 aa, Measles virus
TARIQAAPQPSAPQEP

SEQ ID NO: 2109 - protein, 16 aa, Measles virus
ARIQAAPQPSAPQEPR

SEQ ID NO: 2110 - protein, 16 aa, Measles virus
RIQAAPQPSAPQEPRT

SEQ ID NO: 2111 - protein, 16 aa, Measles virus
IQAAPQPSAPQEPRTH

SEQ ID NO: 2112 - protein, 16 aa, Measles virus
QAAPQPSAPQEPRTHD

SEQ ID NO: 2113 - protein, 16 aa, Measles virus
AAPQPSAPQEPRTHDD

SEQ ID NO: 2114 - protein, 16 aa, Measles virus
APQPSAPQEPRTHDDA

SEQ ID NO: 2115 - protein, 16 aa, Measles virus
PQPSAPQEPRTHDDAI

SEQ ID NO: 2116 - protein, 16 aa, Measles virus
QPSAPQEPRTHDDAIT

SEQ ID NO: 2117 - protein, 16 aa, Measles virus
PSAPQEPRTHDDAITN

SEQ ID NO: 2118 - protein, 17 aa, Measles virus
SRRKTARIQAAPQPSAP

SEQ ID NO: 2119 - protein, 17 aa, Measles virus
RRKTARIQAAPQPSAPQ

SEQ ID NO: 2120 - protein, 17 aa, Measles virus
RKTARIQAAPQPSAPQE

SEQ ID NO: 2121 - protein, 17 aa, Measles virus
KTARIQAAPQPSAPQEP

SEQ ID NO: 2122 - protein, 17 aa, Measles virus
TARIQAAPQPSAPQEPR

SEQ ID NO: 2123 - protein, 17 aa, Measles virus
ARIQAAPQPSAPQEPRT

SEQ ID NO: 2124 - protein, 17 aa, Measles virus
RIQAAPQPSAPQEPRTH

SEQ ID NO: 2125 - protein, 17 aa, Measles virus
IQAAPQPSAPQEPRTHD

SEQ ID NO: 2126 - protein, 17 aa, Measles virus
QAAPQPSAPQEPRTHDD

SEQ ID NO: 2127 - protein, 17 aa, Measles virus
AAPQPSAPQEPRTHDDA

SEQ ID NO: 2128 - protein, 17 aa, Measles virus
APQPSAPQEPRTHDDAI

SEQ ID NO: 2129 - protein, 17 aa, Measles virus
PQPSAPQEPRTHDDAIT

SEQ ID NO: 2130 - protein, 17 aa, Measles virus
QPSAPQEPRTHDDAITN

SEQ ID NO: 2131 - protein, 17 aa, Measles virus
PSAPQEPRTHDDAITND

SEQ ID NO: 2132 - protein, 18 aa, Measles virus
RSRRKTARIQAAPQPSAP

SEQ ID NO: 2133 - protein, 18 aa, Measles virus
SRRKTARIQAAPQPSAPQ

SEQ ID NO: 2134 - protein, 18 aa, Measles virus
RRKTARIQAAPQPSAPQE

SEQ ID NO: 2135 - protein, 18 aa, Measles virus
RKTARIQAAPQPSAPQEP

SEQ ID NO: 2136 - protein, 18 aa, Measles virus
KTARIQAAPQPSAPQEPR

SEQ ID NO: 2137 - protein, 18 aa, Measles virus
TARIQAAPQPSAPQEPRT

SEQ ID NO: 2138 - protein, 18 aa, Measles virus
ARIQAAPQPSAPQEPRTH

SEQ ID NO: 2139 - protein, 18 aa, Measles virus
RIQAAPQPSAPQEPRTHD

SEQ ID NO: 2140 - protein, 18 aa, Measles virus
IQAAPQPSAPQEPRTHDD

SEQ ID NO: 2141 - protein, 18 aa, Measles virus
QAAPQPSAPQEPRTHDDA

SEQ ID NO: 2142 - protein, 18 aa, Measles virus
AAPQPSAPQEPRTHDDAI

SEQ ID NO: 2143 - protein, 18 aa, Measles virus
APQPSAPQEPRTHDDAIT

SEQ ID NO: 2144 - protein, 18 aa, Measles virus
PQPSAPQEPRTHDDAITN

SEQ ID NO: 2145 - protein, 18 aa, Measles virus
QPSAPQEPRTHDDAITND

SEQ ID NO: 2146 - protein, 18 aa, Measles virus
PSAPQEPRTHDDAITNDD

SEQ ID NO: 2147 - protein, 19 aa, Measles virus
WRSRRKTARIQAAPQPSAP

SEQ ID NO: 2148 - protein, 19 aa, Measles virus
RSRRKTARIQAAPQPSAPQ

SEQ ID NO: 2149 - protein, 19 aa, Measles virus
SRRKTARIQAAPQPSAPQE

SEQ ID NO: 2150 - protein, 19 aa, Measles virus
RRKTARIQAAPQPSAPQEP

SEQ ID NO: 2151 - protein, 19 aa, Measles virus
RKTARIQAAPQPSAPQEPR

SEQ ID NO: 2152 - protein, 19 aa, Measles virus
KTARIQAAPQPSAPQEPRT

SEQ ID NO: 2153 - protein, 19 aa, Measles virus
TARIQAAPQPSAPQEPRTH

SEQ ID NO: 2154 - protein, 19 aa, Measles virus
ARIQAAPQPSAPQEPRTHD

SEQ ID NO: 2155 - protein, 19 aa, Measles virus
RIQAAPQPSAPQEPRTHDD

SEQ ID NO: 2156 - protein, 19 aa, Measles virus
IQAAPQPSAPQEPRTHDDA

SEQ ID NO: 2157 - protein, 19 aa, Measles virus
QAAPQPSAPQEPRTHDDAI

SEQ ID NO: 2158 - protein, 19 aa, Measles virus
AAPQPSAPQEPRTHDDAIT

SEQ ID NO: 2159 - protein, 19 aa, Measles virus
APQPSAPQEPRTHDDAITN

SEQ ID NO: 2160 - protein, 19 aa, Measles virus
PQPSAPQEPRTHDDAITND

SEQ ID NO: 2161 - protein, 19 aa, Measles virus
QPSAPQEPRTHDDAITNDD

SEQ ID NO: 2162 - protein, 19 aa, Measles virus
PSAPQEPRTHDDAITNDDQ

SEQ ID NO: 2163 - protein, 20 aa, Measles virus
LWRSRRKTARIQAAPQPSAP

SEQ ID NO: 2164 - protein, 20 aa, Measles virus
WRSRRKTARIQAAPQPSAPQ

SEQ ID NO: 2165 - protein, 20 aa, Measles virus
RSRRKTARIQAAPQPSAPQE

SEQ ID NO: 2166 - protein, 20 aa, Measles virus
SRRKTARIQAAPQPSAPQEP

SEQ ID NO: 2167 - protein, 20 aa, Measles virus
RRKTARIQAAPQPSAPQEPR

SEQ ID NO: 2168 - protein, 20 aa, Measles virus
RKTARIQAAPQPSAPQEPRT

SEQ ID NO: 2169 - protein, 20 aa, Measles virus
KTARIQAAPQPSAPQEPRTH

SEQ ID NO: 2170 - protein, 20 aa, Measles virus
TARIQAAPQPSAPQEPRTHD

SEQ ID NO: 2171 - protein, 20 aa, Measles virus
ARIQAAPQPSAPQEPRTHDD

SEQ ID NO: 2172 - protein, 20 aa, Measles virus
RIQAAPQPSAPQEPRTHDDA

SEQ ID NO: 2173 - protein, 20 aa, Measles virus
IQAAPQPSAPQEPRTHDDAI

SEQ ID NO: 2174 - protein, 20 aa, Measles virus
QAAPQPSAPQEPRTHDDAIT

SEQ ID NO: 2175 - protein, 20 aa, Measles virus
AAPQPSAPQEPRTHDDAITN

SEQ ID NO: 2176 - protein, 20 aa, Measles virus
APQPSAPQEPRTHDDAITND

SEQ ID NO: 2177 - protein, 20 aa, Measles virus
PQPSAPQEPRTHDDAITNDD

SEQ ID NO: 2178 - protein, 20 aa, Measles virus
QPSAPQEPRTHDDAITNDDQ

SEQ ID NO: 2179 - protein, 20 aa, Measles virus
PSAPQEPRTHDDAITNDDQG

SEQ ID NO: 2180 - protein, 8 aa, Rubella virus
PRERPSAP

SEQ ID NO: 2181 - protein, 8 aa, Rubella virus
RERPSAPA

SEQ ID NO: 2182 - protein, 8 aa, Rubella virus
ERPSAPAG

SEQ ID NO: 2183 - protein, 8 aa, Rubella virus
RPSAPAGP

SEQ ID NO: 2184 - protein, 8 aa, Rubella virus
PSAPAGPP

SEQ ID NO: 2185 - protein, 9 aa, Rubella virus
APRERPSAP

SEQ ID NO: 2186 - protein, 9 aa, Rubella virus
PRERPSAPA

SEQ ID NO: 2187 - protein, 9 aa, Rubella virus
RERPSAPAG

SEQ ID NO: 2188 - protein, 9 aa, Rubella virus
ERPSAPAGP

SEQ ID NO: 2189 - protein, 9 aa, Rubella virus
RPSAPAGPP

SEQ ID NO: 2190 - protein, 9 aa, Rubella virus
PSAPAGPPD

SEQ ID NO: 2191 - protein, 10 aa, Rubella virus
DAPRERPSAP

SEQ ID NO: 2192 - protein, 10 aa, Rubella virus
APRERPSAPA

SEQ ID NO: 2193 - protein, 10 aa, Rubella virus
PRERPSAPAG

SEQ ID NO: 2194 - protein, 10 aa, Rubella virus
RERPSAPAGP

SEQ ID NO: 2195 - protein, 10 aa, Rubella virus
ERPSAPAGPP

SEQ ID NO: 2196 - protein, 10 aa, Rubella virus
RPSAPAGPPD

SEQ ID NO: 2197 - protein, 10 aa, Rubella virus
PSAPAGPPDD

SEQ ID NO: 2198 - protein, 11 aa, Rubella virus
CDAPRERPSAP

SEQ ID NO: 2199 - protein, 11 aa, Rubella virus
DAPRERPSAPA

SEQ ID NO: 2200 - protein, 11 aa, Rubella virus
APRERPSAPAG

SEQ ID NO: 2201 - protein, 11 aa, Rubella virus
PRERPSAPAGP

SEQ ID NO: 2202 - protein, 11 aa, Rubella virus
RERPSAPAGPP

SEQ ID NO: 2203 - protein, 11 aa, Rubella virus
ERPSAPAGPPD

SEQ ID NO: 2204 - protein, 11 aa, Rubella virus
RPSAPAGPPDD

SEQ ID NO: 2205 - protein, 11 aa, Rubella virus
PSAPAGPPDDE

SEQ ID NO: 2206 - protein, 12 aa, Rubella virus
RCDAPRERPSAP

SEQ ID NO: 2207 - protein, 12 aa, Rubella virus
CDAPRERPSAPA

SEQ ID NO: 2208 - protein, 12 aa, Rubella virus
DAPRERPSAPAG

SEQ ID NO: 2209 - protein, 12 aa, Rubella virus
APRERPSAPAGP

SEQ ID NO: 2210 - protein, 12 aa, Rubella virus
PRERPSAPAGPP

SEQ ID NO: 2211 - protein, 12 aa, Rubella virus
RERPSAPAGPPD

SEQ ID NO: 2212 - protein, 12 aa, Rubella virus
ERPSAPAGPPDD

SEQ ID NO: 2213 - protein, 12 aa, Rubella virus
RPSAPAGPPDDE

SEQ ID NO: 2214 - protein, 12 aa, Rubella virus
PSAPAGPPDDEA

SEQ ID NO: 2215 - protein, 13 aa, Rubella virus
PRCDAPRERPSAP

SEQ ID NO: 2216 - protein, 13 aa, Rubella virus
RCDAPRERPSAPA

SEQ ID NO: 2217 - protein, 13 aa, Rubella virus
CDAPRERPSAPAG

SEQ ID NO: 2218 - protein, 13 aa, Rubella virus
DAPRERPSAPAGP

SEQ ID NO: 2219 - protein, 13 aa, Rubella virus
APRERPSAPAGPP

SEQ ID NO: 2220 - protein, 13 aa, Rubella virus
PRERPSAPAGPPD

SEQ ID NO: 2221 - protein, 13 aa, Rubella virus
RERPSAPAGPPDD

SEQ ID NO: 2222 - protein, 13 aa, Rubella virus
ERPSAPAGPPDDE

SEQ ID NO: 2223 - protein, 13 aa, Rubella virus
RPSAPAGPPDDEA

SEQ ID NO: 2224 - protein, 13 aa, Rubella virus
PSAPAGPPDDEAL

SEQ ID NO: 2225 - protein, 14 aa, Rubella virus
APRCDAPRERPSAP

SEQ ID NO: 2226 - protein, 14 aa, Rubella virus
PRCDAPRERPSAPA

SEQ ID NO: 2227 - protein, 14 aa, Rubella virus
RCDAPRERPSAPAG

SEQ ID NO: 2228 - protein, 14 aa, Rubella virus
CDAPRERPSAPAGP

SEQ ID NO: 2229 - protein, 14 aa, Rubella virus
DAPRERPSAPAGPP

SEQ ID NO: 2230 - protein, 14 aa, Rubella virus
APRERPSAPAGPPD

SEQ ID NO: 2231 - protein, 14 aa, Rubella virus
PRERPSAPAGPPDD

SEQ ID NO: 2232 - protein, 14 aa, Rubella virus
RERPSAPAGPPDDE

SEQ ID NO: 2233 - protein, 14 aa, Rubella virus
ERPSAPAGPPDDEA

SEQ ID NO: 2234 - protein, 14 aa, Rubella virus
RPSAPAGPPDDEAL

SEQ ID NO: 2235 - protein, 14 aa, Rubella virus
PSAPAGPPDDEALI

SEQ ID NO: 2236 - protein, 15 aa, Rubella virus
CAPRCDAPRERPSAP

SEQ ID NO: 2237 - protein, 15 aa, Rubella virus
APRCDAPRERPSAPA

SEQ ID NO: 2238 - protein, 15 aa, Rubella virus
PRCDAPRERPSAPAG

SEQ ID NO: 2239 - protein, 15 aa, Rubella virus
RCDAPRERPSAPAGP

SEQ ID NO: 2240 - protein, 15 aa, Rubella virus
CDAPRERPSAPAGPP

SEQ ID NO: 2241 - protein, 15 aa, Rubella virus
DAPRERPSAPAGPPD

SEQ ID NO: 2242 - protein, 15 aa, Rubella virus
APRERPSAPAGPPDD

SEQ ID NO: 2243 - protein, 15 aa, Rubella virus
PRERPSAPAGPPDDE

SEQ ID NO: 2244 - protein, 15 aa, Rubella virus
RERPSAPAGPPDDEA

SEQ ID NO: 2245 - protein, 15 aa, Rubella virus
ERPSAPAGPPDDEAL

SEQ ID NO: 2246 - protein, 15 aa, Rubella virus
RPSAPAGPPDDEALI

SEQ ID NO: 2247 - protein, 15 aa, Rubella virus
PSAPAGPPDDEALIP

SEQ ID NO: 2248 - protein, 16 aa, Rubella virus
ACAPRCDAPRERPSAP

SEQ ID NO: 2249 - protein, 16 aa, Rubella virus
CAPRCDAPRERPSAPA

SEQ ID NO: 2250 - protein, 16 aa, Rubella virus
APRCDAPRERPSAPAG

SEQ ID NO: 2251 - protein, 16 aa, Rubella virus
PRCDAPRERPSAPAGP

SEQ ID NO: 2252 - protein, 16 aa, Rubella virus
RCDAPRERPSAPAGPP

SEQ ID NO: 2253 - protein, 16 aa, Rubella virus
CDAPRERPSAPAGPPD

SEQ ID NO: 2254 - protein, 16 aa, Rubella virus
DAPRERPSAPAGPPDD

SEQ ID NO: 2255 - protein, 16 aa, Rubella virus
APRERPSAPAGPPDDE

SEQ ID NO: 2256 - protein, 16 aa, Rubella virus
PRERPSAPAGPPDDEA

SEQ ID NO: 2257 - protein, 16 aa, Rubella virus
RERPSAPAGPPDDEAL

SEQ ID NO: 2258 - protein, 16 aa, Rubella virus
ERPSAPAGPPDDEALI

SEQ ID NO: 2259 - protein, 16 aa, Rubella virus
RPSAPAGPPDDEALIP

SEQ ID NO: 2260 - protein, 16 aa, Rubella virus
PSAPAGPPDDEALIPP

SEQ ID NO: 2261 - protein, 17 aa, Rubella virus
CACAPRCDAPRERPSAP

SEQ ID NO: 2262 - protein, 17 aa, Rubella virus
ACAPRCDAPRERPSAPA

SEQ ID NO: 2263 - protein, 17 aa, Rubella virus
CAPRCDAPRERPSAPAG

SEQ ID NO: 2264 - protein, 17 aa, Rubella virus
APRCDAPRERPSAPAGP

SEQ ID NO: 2265 - protein, 17 aa, Rubella virus
PRCDAPRERPSAPAGPP

SEQ ID NO: 2266 - protein, 17 aa, Rubella virus
RCDAPRERPSAPAGPPD

SEQ ID NO: 2267 - protein, 17 aa, Rubella virus
CDAPRERPSAPAGPPDD

SEQ ID NO: 2268 - protein, 17 aa, Rubella virus
DAPRERPSAPAGPPDDE

SEQ ID NO: 2269 - protein, 17 aa, Rubella virus
APRERPSAPAGPPDDEA

SEQ ID NO: 2270 - protein, 17 aa, Rubella virus
PRERPSAPAGPPDDEAL

SEQ ID NO: 2271 - protein, 17 aa, Rubella virus
RERPSAPAGPPDDEALI

SEQ ID NO: 2272 - protein, 17 aa, Rubella virus
ERPSAPAGPPDDEALIP

SEQ ID NO: 2273 - protein, 17 aa, Rubella virus
RPSAPAGPPDDEALIPP

SEQ ID NO: 2274 - protein, 17 aa, Rubella virus
PSAPAGPPDDEALIPPW

SEQ ID NO: 2275 - protein, 18 aa, Rubella virus
HCACAPRCDAPRERPSAP

SEQ ID NO: 2276 - protein, 18 aa, Rubella virus
CACAPRCDAPRERPSAPA

SEQ ID NO: 2277 - protein, 18 aa, Rubella virus
ACAPRCDAPRERPSAPAG

SEQ ID NO: 2278 - protein, 18 aa, Rubella virus
CAPRCDAPRERPSAPAGP

SEQ ID NO: 2279 - protein, 18 aa, Rubella virus
APRCDAPRERPSAPAGPP

SEQ ID NO: 2280 - protein, 18 aa, Rubella virus
PRCDAPRERPSAPAGPPD

SEQ ID NO: 2281 - protein, 18 aa, Rubella virus
RCDAPRERPSAPAGPPDD

SEQ ID NO: 2282 - protein, 18 aa, Rubella virus
CDAPRERPSAPAGPPDDE

SEQ ID NO: 2283 - protein, 18 aa, Rubella virus
DAPRERPSAPAGPPDDEA

SEQ ID NO: 2284 - protein, 18 aa, Rubella virus
APRERPSAPAGPPDDEAL

SEQ ID NO: 2285 - protein, 18 aa, Rubella virus
PRERPSAPAGPPDDEALI

SEQ ID NO: 2286 - protein, 18 aa, Rubella virus
RERPSAPAGPPDDEALIP

SEQ ID NO: 2287 - protein, 18 aa, Rubella virus
ERPSAPAGPPDDEALIPP

SEQ ID NO: 2288 - protein, 18 aa, Rubella virus
RPSAPAGPPDDEALIPPW

SEQ ID NO: 2289 - protein, 18 aa, Rubella virus
PSAPAGPPDDEALIPPWL

SEQ ID NO: 2290 - protein, 19 aa, Rubella virus
RHCACAPRCDAPRERPSAP

SEQ ID NO: 2291 - protein, 19 aa, Rubella virus
HCACAPRCDAPRERPSAPA

SEQ ID NO: 2292 - protein, 19 aa, Rubella virus
CACAPRCDAPRERPSAPAG

SEQ ID NO: 2293 - protein, 19 aa, Rubella virus
ACAPRCDAPRERPSAPAGP

SEQ ID NO: 2294 - protein, 19 aa, Rubella virus
CAPRCDAPRERPSAPAGPP

SEQ ID NO: 2295 - protein, 19 aa, Rubella virus
APRCDAPRERPSAPAGPPD

SEQ ID NO: 2296 - protein, 19 aa, Rubella virus
PRCDAPRERPSAPAGPPDD

SEQ ID NO: 2297 - protein, 19 aa, Rubella virus
RCDAPRERPSAPAGPPDDE

SEQ ID NO: 2298 - protein, 19 aa, Rubella virus
CDAPRERPSAPAGPPDDEA

SEQ ID NO: 2299 - protein, 19 aa, Rubella virus
DAPRERPSAPAGPPDDEAL

SEQ ID NO: 2300 - protein, 19 aa, Rubella virus
APRERPSAPAGPPDDEALI

SEQ ID NO: 2301 - protein, 19 aa, Rubella virus
PRERPSAPAGPPDDEALIP

SEQ ID NO: 2302 - protein, 19 aa, Rubella virus
RERPSAPAGPPDDEALIPP

SEQ ID NO: 2303 - protein, 19 aa, Rubella virus
ERPSAPAGPPDDEALIPPW

SEQ ID NO: 2304 - protein, 19 aa, Rubella virus
RPSAPAGPPDDEALIPPWL

SEQ ID NO: 2305 - protein, 19 aa, Rubella virus
PSAPAGPPDDEALIPPWLF

SEQ ID NO: 2306 - protein, 20 aa, Rubella virus
DRHCACAPRCDAPRERPSAP

SEQ ID NO: 2307 - protein, 20 aa, Rubella virus
RHCACAPRCDAPRERPSAPA

SEQ ID NO: 2308 - protein, 20 aa, Rubella virus
HCACAPRCDAPRERPSAPAG

SEQ ID NO: 2309 - protein, 20 aa, Rubella virus
CACAPRCDAPRERPSAPAGP

SEQ ID NO: 2310 - protein, 20 aa, Rubella virus
ACAPRCDAPRERPSAPAGPP

SEQ ID NO: 2311 - protein, 20 aa, Rubella virus
CAPRCDAPRERPSAPAGPPD

SEQ ID NO: 2312 - protein, 20 aa, Rubella virus
APRCDAPRERPSAPAGPPDD

SEQ ID NO: 2313 - protein, 20 aa, Rubella virus
PRCDAPRERPSAPAGPPDDE

SEQ ID NO: 2314 - protein, 20 aa, Rubella virus
RCDAPRERPSAPAGPPDDEA

SEQ ID NO: 2315 - protein, 20 aa, Rubella virus
CDAPRERPSAPAGPPDDEAL

SEQ ID NO: 2316 - protein, 20 aa, Rubella virus
DAPRERPSAPAGPPDDEALI

SEQ ID NO: 2317 - protein, 20 aa, Rubella virus
APRERPSAPAGPPDDEALIP

SEQ ID NO: 2318 - protein, 20 aa, Rubella virus
PRERPSAPAGPPDDEALIPP

SEQ ID NO: 2319 - protein, 20 aa, Rubella virus
RERPSAPAGPPDDEALIPPW

SEQ ID NO: 2320 - protein, 20 aa, Rubella virus
ERPSAPAGPPDDEALIPPWL

SEQ ID NO: 2321 - protein, 20 aa, Rubella virus
RPSAPAGPPDDEALIPPWLF

SEQ ID NO: 2322 - protein, 20 aa, Rubella virus
PSAPAGPPDDEALIPPWLFA

SEQ ID NO: 2323 - protein, 8 aa, Colorado tick fever virus
TRVAPSAP

SEQ ID NO: 2324 - protein, 8 aa, Colorado tick fever virus
RVAPSAPS

SEQ ID NO: 2325 - protein, 8 aa, Colorado tick fever virus
VAPSAPSA

SEQ ID NO: 2326 - protein, 8 aa, Colorado tick fever virus
APSAPSAS

SEQ ID NO: 2327 - protein, 8 aa, Colorado tick fever virus
PSAPSASL

SEQ ID NO: 2328 - protein, 9 aa, Colorado tick fever virus
STRVAPSAP

SEQ ID NO: 2329 - protein, 9 aa, Colorado tick fever virus
TRVAPSAPS

SEQ ID NO: 2330 - protein, 9 aa, Colorado tick fever virus
RVAPSAPSA

SEQ ID NO: 2331 - protein, 9 aa, Colorado tick fever virus
VAPSAPSAS

SEQ ID NO: 2332 - protein, 9 aa, Colorado tick fever virus
APSAPSASL

SEQ ID NO: 2333 - protein, 9 aa, Colorado tick fever virus
PSAPSASLF

SEQ ID NO: 2334 - protein, 10 aa, Colorado tick fever virus
LSTRVAPSAP

SEQ ID NO: 2335 - protein, 10 aa, Colorado tick fever virus
STRVAPSAPS

SEQ ID NO: 2336 - protein, 10 aa, Colorado tick fever virus
TRVAPSAPSA

SEQ ID NO: 2337 - protein, 10 aa, Colorado tick fever virus
RVAPSAPSAS

SEQ ID NO: 2338 - protein, 10 aa, Colorado tick fever virus
VAPSAPSASL

SEQ ID NO: 2339 - protein, 10 aa, Colorado tick fever virus
APSAPSASLF

SEQ ID NO: 2340 - protein, 10 aa, Colorado tick fever virus
PSAPSASLFT

SEQ ID NO: 2341 - protein, 11 aa, Colorado tick fever virus
PLSTRVAPSAP

SEQ ID NO: 2342 - protein, 11 aa, Colorado tick fever virus
LSTRVAPSAPS

SEQ ID NO: 2343 - protein, 11 aa, Colorado tick fever virus
STRVAPSAPSA

SEQ ID NO: 2344 - protein, 11 aa, Colorado tick fever virus
TRVAPSAPSAS

SEQ ID NO: 2345 - protein, 11 aa, Colorado tick fever virus
RVAPSAPSASL

SEQ ID NO: 2346 - protein, 11 aa, Colorado tick fever virus
VAPSAPSASLF

SEQ ID NO: 2347 - protein, 11 aa, Colorado tick fever virus
APSAPSASLFT

SEQ ID NO: 2348 - protein, 11 aa, Colorado tick fever virus
PSAPSASLFTA

SEQ ID NO: 2349 - protein, 12 aa, Colorado tick fever virus
TPLSTRVAPSAP

SEQ ID NO: 2350 - protein, 12 aa, Colorado tick fever virus
PLSTRVAPSAPS

SEQ ID NO: 2351 - protein, 12 aa, Colorado tick fever virus
LSTRVAPSAPSA

SEQ ID NO: 2352 - protein, 12 aa, Colorado tick fever virus
STRVAPSAPSAS

SEQ ID NO: 2353 - protein, 12 aa, Colorado tick fever virus
TRVAPSAPSASL

SEQ ID NO: 2354 - protein, 12 aa, Colorado tick fever virus
RVAPSAPSASLF

SEQ ID NO: 2355 - protein, 12 aa, Colorado tick fever virus
VAPSAPSASLFT

SEQ ID NO: 2356 - protein, 12 aa, Colorado tick fever virus
APSAPSASLFTA

SEQ ID NO: 2357 - protein, 12 aa, Colorado tick fever virus
PSAPSASLFTAG

SEQ ID NO: 2358 - protein, 13 aa, Colorado tick fever virus
ETPLSTRVAPSAP

SEQ ID NO: 2359 - protein, 13 aa, Colorado tick fever virus
TPLSTRVAPSAPS

SEQ ID NO: 2360 - protein, 13 aa, Colorado tick fever virus
PLSTRVAPSAPSA

SEQ ID NO: 2361 - protein, 13 aa, Colorado tick fever virus
LSTRVAPSAPSAS

SEQ ID NO: 2362 - protein, 13 aa, Colorado tick fever virus
STRVAPSAPSASL

SEQ ID NO: 2363 - protein, 13 aa, Colorado tick fever virus
TRVAPSAPSASLF

SEQ ID NO: 2364 - protein, 13 aa, Colorado tick fever virus
RVAPSAPSASLFT

SEQ ID NO: 2365 - protein, 13 aa, Colorado tick fever virus
VAPSAPSASLFTA

SEQ ID NO: 2366 - protein, 13 aa, Colorado tick fever virus
APSAPSASLFTAG

SEQ ID NO: 2367 - protein, 13 aa, Colorado tick fever virus
PSAPSASLFTAGG

SEQ ID NO: 2368 - protein, 14 aa, Colorado tick fever virus
CETPLSTRVAPSAP

SEQ ID NO: 2369 - protein, 14 aa, Colorado tick fever virus
ETPLSTRVAPSAPS

SEQ ID NO: 2370 - protein, 14 aa, Colorado tick fever virus
TPLSTRVAPSAPSA

SEQ ID NO: 2371 - protein, 14 aa, Colorado tick fever virus
PLSTRVAPSAPSAS

SEQ ID NO: 2372 - protein, 14 aa, Colorado tick fever virus
LSTRVAPSAPSASL

SEQ ID NO: 2373 - protein, 14 aa, Colorado tick fever virus
STRVAPSAPSASLF

SEQ ID NO: 2374 - protein, 14 aa, Colorado tick fever virus
TRVAPSAPSASLFT

SEQ ID NO: 2375 - protein, 14 aa, Colorado tick fever virus
RVAPSAPSASLFTA

SEQ ID NO: 2376 - protein, 14 aa, Colorado tick fever virus
VAPSAPSASLFTAG

SEQ ID NO: 2377 - protein, 14 aa, Colorado tick fever virus
APSAPSASLFTAGG

SEQ ID NO: 2378 - protein, 14 aa, Colorado tick fever virus
PSAPSASLFTAGGI

SEQ ID NO: 2379 - protein, 15 aa, Colorado tick fever virus
ICETPLSTRVAPSAP

SEQ ID NO: 2380 - protein, 15 aa, Colorado tick fever virus
CETPLSTRVAPSAPS

SEQ ID NO: 2381 - protein, 15 aa, Colorado tick fever virus
ETPLSTRVAPSAPSA

SEQ ID NO: 2382 - protein, 15 aa, Colorado tick fever virus
TPLSTRVAPSAPSAS

SEQ ID NO: 2383 - protein, 15 aa, Colorado tick fever virus
PLSTRVAPSAPSASL

SEQ ID NO: 2384 - protein, 15 aa, Colorado tick fever virus
LSTRVAPSAPSASLF

SEQ ID NO: 2385 - protein, 15 aa, Colorado tick fever virus
STRVAPSAPSASLFT

SEQ ID NO: 2386 - protein, 15 aa, Colorado tick fever virus
TRVAPSAPSASLFTA

SEQ ID NO: 2387 - protein, 15 aa, Colorado tick fever virus
RVAPSAPSASLFTAG

SEQ ID NO: 2388 - protein, 15 aa, Colorado tick fever virus
VAPSAPSASLFTAGG

SEQ ID NO: 2389 - protein, 15 aa, Colorado tick fever virus
APSAPSASLFTAGGI

SEQ ID NO: 2390 - protein, 15 aa, Colorado tick fever virus
PSAPSASLFTAGGIG

SEQ ID NO: 2391 - protein, 16 aa, Colorado tick fever virus
HICETPLSTRVAPSAP

SEQ ID NO: 2392 - protein, 16 aa, Colorado tick fever virus
ICETPLSTRVAPSAPS

SEQ ID NO: 2393 - protein, 16 aa, Colorado tick fever virus
CETPLSTRVAPSAPSA

SEQ ID NO: 2394 - protein, 16 aa, Colorado tick fever virus
ETPLSTRVAPSAPSAS

SEQ ID NO: 2395 - protein, 16 aa, Colorado tick fever virus
TPLSTRVAPSAPSASL

SEQ ID NO: 2396 - protein, 16 aa, Colorado tick fever virus
PLSTRVAPSAPSASLF

SEQ ID NO: 2397 - protein, 16 aa, Colorado tick fever virus
LSTRVAPSAPSASLFT

SEQ ID NO: 2398 - protein, 16 aa, Colorado tick fever virus
STRVAPSAPSASLFTA

SEQ ID NO: 2399 - protein, 16 aa, Colorado tick fever virus
TRVAPSAPSASLFTAG

SEQ ID NO: 2400 - protein, 16 aa, Colorado tick fever virus
RVAPSAPSASLFTAGG

SEQ ID NO: 2401 - protein, 16 aa, Colorado tick fever virus
VAPSAPSASLFTAGGI

SEQ ID NO: 2402 - protein, 16 aa, Colorado tick fever virus
APSAPSASLFTAGGIG

SEQ ID NO: 2403 - protein, 16 aa, Colorado tick fever virus
PSAPSASLFTAGGIGL

SEQ ID NO: 2404 - protein, 17 aa, Colorado tick fever virus
PHICETPLSTRVAPSAP

SEQ ID NO: 2405 - protein, 17 aa, Colorado tick fever virus
HICETPLSTRVAPSAPS

SEQ ID NO: 2406 - protein, 17 aa, Colorado tick fever virus
ICETPLSTRVAPSAPSA

SEQ ID NO: 2407 - protein, 17 aa, Colorado tick fever virus
CETPLSTRVAPSAPSAS

SEQ ID NO: 2408 - protein, 17 aa, Colorado tick fever virus
ETPLSTRVAPSAPSASL

SEQ ID NO: 2409 - protein, 17 aa, Colorado tick fever virus
TPLSTRVAPSAPSASLF

SEQ ID NO: 2410 - protein, 17 aa, Colorado tick fever virus
PLSTRVAPSAPSASLFT

SEQ ID NO: 2411 - protein, 17 aa, Colorado tick fever virus
LSTRVAPSAPSASLFTA

SEQ ID NO: 2412 - protein, 17 aa, Colorado tick fever virus
STRVAPSAPSASLFTAG

SEQ ID NO: 2413 - protein, 17 aa, Colorado tick fever virus
TRVAPSAPSASLFTAGG

SEQ ID NO: 2414 - protein, 17 aa, Colorado tick fever virus
RVAPSAPSASLFTAGGI

SEQ ID NO: 2415 - protein, 17 aa, Colorado tick fever virus
VAPSAPSASLFTAGGIG

SEQ ID NO: 2416 - protein, 17 aa, Colorado tick fever virus
APSAPSASLFTAGGIGL

SEQ ID NO: 2417 - protein, 17 aa, Colorado tick fever virus
PSAPSASLFTAGGIGLP

SEQ ID NO: 2418 - protein, 18 aa, Colorado tick fever virus
SPHICETPLSTRVAPSAP

SEQ ID NO: 2419 - protein, 18 aa, Colorado tick fever virus
PHICETPLSTRVAPSAPS

SEQ ID NO: 2420 - protein, 18 aa, Colorado tick fever virus
HICETPLSTRVAPSAPSA

SEQ ID NO: 2421 - protein, 18 aa, Colorado tick fever virus
ICETPLSTRVAPSAPSAS

SEQ ID NO: 2422 - protein, 18 aa, Colorado tick fever virus
CETPLSTRVAPSAPSASL

SEQ ID NO: 2423 - protein, 18 aa, Colorado tick fever virus
ETPLSTRVAPSAPSASLF

SEQ ID NO: 2424 - protein, 18 aa, Colorado tick fever virus
TPLSTRVAPSAPSASLFT

SEQ ID NO: 2425 - protein, 18 aa, Colorado tick fever virus
PLSTRVAPSAPSASLFTA

SEQ ID NO: 2426 - protein, 18 aa, Colorado tick fever virus
LSTRVAPSAPSASLFTAG

SEQ ID NO: 2427 - protein, 18 aa, Colorado tick fever virus
STRVAPSAPSASLFTAGG

SEQ ID NO: 2428 - protein, 18 aa, Colorado tick fever virus
TRVAPSAPSASLFTAGGI

SEQ ID NO: 2429 - protein, 18 aa, Colorado tick fever virus
RVAPSAPSASLFTAGGIG

SEQ ID NO: 2430 - protein, 18 aa, Colorado tick fever virus
VAPSAPSASLFTAGGIGL

SEQ ID NO: 2431 - protein, 18 aa, Colorado tick fever virus
APSAPSASLFTAGGIGLP

SEQ ID NO: 2432 - protein, 19 aa, Colorado tick fever virus
ASPHICETPLSTRVAPSAP

SEQ ID NO: 2433 - protein, 19 aa, Colorado tick fever virus
SPHICETPLSTRVAPSAPS

SEQ ID NO: 2434 - protein, 19 aa, Colorado tick fever virus
PHICETPLSTRVAPSAPSA

SEQ ID NO: 2435 - protein, 19 aa, Colorado tick fever virus
HICETPLSTRVAPSAPSAS

SEQ ID NO: 2436 - protein, 19 aa, Colorado tick fever virus
ICETPLSTRVAPSAPSASL

SEQ ID NO: 2437 - protein, 19 aa, Colorado tick fever virus
CETPLSTRVAPSAPSASLF

SEQ ID NO: 2438 - protein, 19 aa, Colorado tick fever virus
ETPLSTRVAPSAPSASLFT

SEQ ID NO: 2439 - protein, 19 aa, Colorado tick fever virus
TPLSTRVAPSAPSASLFTA

SEQ ID NO: 2440 - protein, 19 aa, Colorado tick fever virus
PLSTRVAPSAPSASLFTAG

SEQ ID NO: 2441 - protein, 19 aa, Colorado tick fever virus
LSTRVAPSAPSASLFTAGG

SEQ ID NO: 2442 - protein, 19 aa, Colorado tick fever virus
STRVAPSAPSASLFTAGGI

SEQ ID NO: 2443 - protein, 19 aa, Colorado tick fever virus
TRVAPSAPSASLFTAGGIG

SEQ ID NO: 2444 - protein, 19 aa, Colorado tick fever virus
RVAPSAPSASLFTAGGIGL

SEQ ID NO: 2445 - protein, 19 aa, Colorado tick fever virus
VAPSAPSASLFTAGGIGLP

SEQ ID NO: 2446 - protein, 20 aa, Colorado tick fever virus
PASPHICETPLSTRVAPSAP

SEQ ID NO: 2447 - protein, 20 aa, Colorado tick fever virus
ASPHICETPLSTRVAPSAPS

SEQ ID NO: 2448 - protein, 20 aa, Colorado tick fever virus
SPHICETPLSTRVAPSAPSA

SEQ ID NO: 2449 - protein, 20 aa, Colorado tick fever virus
PHICETPLSTRVAPSAPSAS

SEQ ID NO: 2450 - protein, 20 aa, Colorado tick fever virus
HICETPLSTRVAPSAPSASL

SEQ ID NO: 2451 - protein, 20 aa, Colorado tick fever virus
ICETPLSTRVAPSAPSASLF

SEQ ID NO: 2452 - protein, 20 aa, Colorado tick fever virus
CETPLSTRVAPSAPSASLFT

SEQ ID NO: 2453 - protein, 20 aa, Colorado tick fever virus
ETPLSTRVAPSAPSASLFTA

SEQ ID NO: 2454 - protein, 20 aa, Colorado tick fever virus
TPLSTRVAPSAPSASLFTAG

SEQ ID NO: 2455 - protein, 20 aa, Colorado tick fever virus
PLSTRVAPSAPSASLFTAGG

SEQ ID NO: 2456 - protein, 20 aa, Colorado tick fever virus
LSTRVAPSAPSASLFTAGGI

SEQ ID NO: 2457 - protein, 20 aa, Colorado tick fever virus
STRVAPSAPSASLFTAGGIG

SEQ ID NO: 2458 - protein, 20 aa, Colorado tick fever virus
TRVAPSAPSASLFTAGGIGL

SEQ ID NO: 2459 - protein, 20 aa, Colorado tick fever virus
RVAPSAPSASLFTAGGIGLP

SEQ ID NO: 2460 - protein, 8 aa, Foot-and-mouth disease virus
RLALPTAP

SEQ ID NO: 2461 - protein, 8 aa, Foot-and-mouth disease virus
LALPTAPR

SEQ ID NO: 2462 - protein, 8 aa, Foot-and-mouth disease virus
ALPTAPRV

SEQ ID NO: 2463 - protein, 8 aa, Foot-and-mouth disease virus
LPTAPRVL

SEQ ID NO: 2464 - protein, 8 aa, Foot-and-mouth disease virus
PTAPRVLA

SEQ ID NO: 2465 - protein, 9 aa, Foot-and-mouth disease virus
TRLALPTAP

SEQ ID NO: 2466 - protein, 9 aa, Foot-and-mouth disease virus
RLALPTAPR

SEQ ID NO: 2467 - protein, 9 aa, Foot-and-mouth disease virus
LALPTAPRV

SEQ ID NO: 2468 - protein, 9 aa, Foot-and-mouth disease virus
ALPTAPRVL

SEQ ID NO: 2469 - protein, 9 aa, Foot-and-mouth disease virus
LPTAPRVLA

SEQ ID NO: 2470 - protein, 9 aa, Foot-and-mouth disease virus
PTAPRVLAT

SEQ ID NO: 2471 - protein, 10 aa, Foot-and-mouth disease virus
LTRLALPTAP

SEQ ID NO: 2472 - protein, 10 aa, Foot-and-mouth disease virus
TRLALPTAPR

SEQ ID NO: 2473 - protein, 10 aa, Foot-and-mouth disease virus
RLALPTAPRV

SEQ ID NO: 2474 - protein, 10 aa, Foot-and-mouth disease virus
LALPTAPRVL

SEQ ID NO: 2475 - protein, 10 aa, Foot-and-mouth disease virus
ALPTAPRVLA

SEQ ID NO: 2476 - protein, 10 aa, Foot-and-mouth disease virus
LPTAPRVLAT

SEQ ID NO: 2477 - protein, 10 aa, Foot-and-mouth disease virus
PTAPRVLATV

SEQ ID NO: 2478 - protein, 11 aa, Foot-and-mouth disease virus
ALTRLALPTAP

SEQ ID NO: 2479 - protein, 11 aa, Foot-and-mouth disease virus
LTRLALPTAPR

SEQ ID NO: 2480 - protein, 11 aa, Foot-and-mouth disease virus
TRLALPTAPRV

SEQ ID NO: 2481 - protein, 11 aa, Foot-and-mouth disease virus
RLALPTAPRVL

SEQ ID NO: 2482 - protein, 11 aa, Foot-and-mouth disease virus
LALPTAPRVLA

SEQ ID NO: 2483 - protein, 11 aa, Foot-and-mouth disease virus
ALPTAPRVLAT

SEQ ID NO: 2484 - protein, 11 aa, Foot-and-mouth disease virus
LPTAPRVLATV

SEQ ID NO: 2485 - protein, 11 aa, Foot-and-mouth disease virus
PTAPRVLATVG

SEQ ID NO: 2486 - protein, 12 aa, Foot-and-mouth disease virus
KALTRLALPTAP

SEQ ID NO: 2487 - protein, 12 aa, Foot-and-mouth disease virus
ALTRLALPTAPR

SEQ ID NO: 2488 - protein, 12 aa, Foot-and-mouth disease virus
LTRLALPTAPRV

SEQ ID NO: 2489 - protein, 12 aa, Foot-and-mouth disease virus
TRLALPTAPRVL

SEQ ID NO: 2490 - protein, 12 aa, Foot-and-mouth disease virus
RLALPTAPRVLA

SEQ ID NO: 2491 - protein, 12 aa, Foot-and-mouth disease virus
LALPTAPRVLAT

SEQ ID NO: 2492 - protein, 12 aa, Foot-and-mouth disease virus
ALPTAPRVLATV

SEQ ID NO: 2493 - protein, 12 aa, Foot-and-mouth disease virus
LPTAPRVLATVG

SEQ ID NO: 2494 - protein, 12 aa, Foot-and-mouth disease virus
PTAPRVLATVGE

SEQ ID NO: 2495 - protein, 13 aa, Foot-and-mouth disease virus
AKALTRLALPTAP

SEQ ID NO: 2496 - protein, 13 aa, Foot-and-mouth disease virus
KALTRLALPTAPR

SEQ ID NO: 2497 - protein, 13 aa, Foot-and-mouth disease virus
ALTRLALPTAPRV

SEQ ID NO: 2498 - protein, 13 aa, Foot-and-mouth disease virus
LTRLALPTAPRVL

SEQ ID NO: 2499 - protein, 13 aa, Foot-and-mouth disease virus
TRLALPTAPRVLA

SEQ ID NO: 2500 - protein, 13 aa, Foot-and-mouth disease virus
RLALPTAPRVLAT

SEQ ID NO: 2501 - protein, 13 aa, Foot-and-mouth disease virus
LALPTAPRVLATV

SEQ ID NO: 2502 - protein, 13 aa, Foot-and-mouth disease virus
ALPTAPRVLATVG

SEQ ID NO: 2503 - protein, 13 aa, Foot-and-mouth disease virus
LPTAPRVLATVGE

SEQ ID NO: 2504 - protein, 13 aa, Foot-and-mouth disease virus
PTAPRVLATVGEC

SEQ ID NO: 2505 - protein, 14 aa, Foot-and-mouth disease virus
TAKALTRLALPTAP

SEQ ID NO: 2506 - protein, 14 aa, Foot-and-mouth disease virus
AKALTRLALPTAPR

SEQ ID NO: 2507 - protein, 14 aa, Foot-and-mouth disease virus
KALTRLALPTAPRV

SEQ ID NO: 2508 - protein, 14 aa, Foot-and-mouth disease virus
ALTRLALPTAPRVL

SEQ ID NO: 2509 - protein, 14 aa, Foot-and-mouth disease virus
LTRLALPTAPRVLA

SEQ ID NO: 2510 - protein, 14 aa, Foot-and-mouth disease virus
TRLALPTAPRVLAT

SEQ ID NO: 2511 - protein, 14 aa, Foot-and-mouth disease virus
RLALPTAPRVLATV

SEQ ID NO: 2512 - protein, 14 aa, Foot-and-mouth disease virus
LALPTAPRVLATVG

SEQ ID NO: 2513 - protein, 14 aa, Foot-and-mouth disease virus
ALPTAPRVLATVGE

SEQ ID NO: 2514 - protein, 14 aa, Foot-and-mouth disease virus
LPTAPRVLATVGEC

SEQ ID NO: 2515 - protein, 14 aa, Foot-and-mouth disease virus
PTAPRVLATVGECR

SEQ ID NO: 2516 - protein, 15 aa, Foot-and-mouth disease virus
DTAKALTRLALPTAP

SEQ ID NO: 2517 - protein, 15 aa, Foot-and-mouth disease virus
TAKALTRLALPTAPR

SEQ ID NO: 2518 - protein, 15 aa, Foot-and-mouth disease virus
AKALTRLALPTAPRV

SEQ ID NO: 2519 - protein, 15 aa, Foot-and-mouth disease virus
KALTRLALPTAPRVL

SEQ ID NO: 2520 - protein, 15 aa, Foot-and-mouth disease virus
ALTRLALPTAPRVLA

SEQ ID NO: 2521 - protein, 15 aa, Foot-and-mouth disease virus
LTRLALPTAPRVLAT

SEQ ID NO: 2522 - protein, 15 aa, Foot-and-mouth disease virus
TRLALPTAPRVLATV

SEQ ID NO: 2523 - protein, 15 aa, Foot-and-mouth disease virus
RLALPTAPRVLATVG

SEQ ID NO: 2524 - protein, 15 aa, Foot-and-mouth disease virus
LALPTAPRVLATVGE

SEQ ID NO: 2525 - protein, 15 aa, Foot-and-mouth disease virus
ALPTAPRVLATVGEC

SEQ ID NO: 2526 - protein, 15 aa, Foot-and-mouth disease virus
LPTAPRVLATVGECR

SEQ ID NO: 2527 - protein, 15 aa, Foot-and-mouth disease virus
PTAPRVLATVGECRY

SEQ ID NO: 2528 - protein, 16 aa, Foot-and-mouth disease virus
LDTAKALTRLALPTAP

SEQ ID NO: 2529 - protein, 16 aa, Foot-and-mouth disease virus
DTAKALTRLALPTAPR

SEQ ID NO: 2530 - protein, 16 aa, Foot-and-mouth disease virus
TAKALTRLALPTAPRV

SEQ ID NO: 2531 - protein, 16 aa, Foot-and-mouth disease virus
AKALTRLALPTAPRVL

SEQ ID NO: 2532 - protein, 16 aa, Foot-and-mouth disease virus
KALTRLALPTAPRVLA

SEQ ID NO: 2533 - protein, 16 aa, Foot-and-mouth disease virus
ALTRLALPTAPRVLAT

SEQ ID NO: 2534 - protein, 16 aa, Foot-and-mouth disease virus
LTRLALPTAPRVLATV

SEQ ID NO: 2535 - protein, 16 aa, Foot-and-mouth disease virus
TRLALPTAPRVLATVG

SEQ ID NO: 2536 - protein, 16 aa, Foot-and-mouth disease virus
RLALPTAPRVLATVGE

SEQ ID NO: 2537 - protein, 16 aa, Foot-and-mouth disease virus
LALPTAPRVLATVGEC

SEQ ID NO: 2538 - protein, 16 aa, Foot-and-mouth disease virus
ALPTAPRVLATVGECR

SEQ ID NO: 2539 - protein, 16 aa, Foot-and-mouth disease virus
LPTAPRVLATVGECRY

SEQ ID NO: 2540 - protein, 16 aa, Foot-and-mouth disease virus
PTAPRVLATVGECRYS

SEQ ID NO: 2541 - protein, 17 aa, Foot-and-mouth disease virus
ALDTAKALTRLALPTAP

SEQ ID NO: 2542 - protein, 17 aa, Foot-and-mouth disease virus
LDTAKALTRLALPTAPR

SEQ ID NO: 2543 - protein, 17 aa, Foot-and-mouth disease virus
DTAKALTRLALPTAPRV

SEQ ID NO: 2544 - protein, 17 aa, Foot-and-mouth disease virus
TAKALTRLALPTAPRVL

SEQ ID NO: 2545 - protein, 17 aa, Foot-and-mouth disease virus
AKALTRLALPTAPRVLA

SEQ ID NO: 2546 - protein, 17 aa, Foot-and-mouth disease virus
KALTRLALPTAPRVLAT

SEQ ID NO: 2547 - protein, 17 aa, Foot-and-mouth disease virus
ALTRLALPTAPRVLATV

SEQ ID NO: 2548 - protein, 17 aa, Foot-and-mouth disease virus
LTRLALPTAPRVLATVG

SEQ ID NO: 2549 - protein, 17 aa, Foot-and-mouth disease virus
TRLALPTAPRVLATVGE

SEQ ID NO: 2550 - protein, 17 aa, Foot-and-mouth disease virus
RLALPTAPRVLATVGEC

SEQ ID NO: 2551 - protein, 17 aa, Foot-and-mouth disease virus
LALPTAPRVLATVGECR

SEQ ID NO: 2552 - protein, 17 aa, Foot-and-mouth disease virus
ALPTAPRVLATVGECRY

SEQ ID NO: 2553 - protein, 17 aa, Foot-and-mouth disease virus
LPTAPRVLATVGECRYS

SEQ ID NO: 2554 - protein, 17 aa, Foot-and-mouth disease virus
PTAPRVLATVGECRYSR

SEQ ID NO: 2555 - protein, 18 aa, Foot-and-mouth disease virus
KALDTAKALTRLALPTAP

SEQ ID NO: 2556 - protein, 18 aa, Foot-and-mouth disease virus
ALDTAKALTRLALPTAPR

SEQ ID NO: 2557 - protein, 18 aa, Foot-and-mouth disease virus
LDTAKALTRLALPTAPRV

SEQ ID NO: 2558 - protein, 18 aa, Foot-and-mouth disease virus
DTAKALTRLALPTAPRVL

SEQ ID NO: 2559 - protein, 18 aa, Foot-and-mouth disease virus
TAKALTRLALPTAPRVLA

SEQ ID NO: 2560 - protein, 18 aa, Foot-and-mouth disease virus
AKALTRLALPTAPRVLAT

SEQ ID NO: 2561 - protein, 18 aa, Foot-and-mouth disease virus
KALTRLALPTAPRVLATV

SEQ ID NO: 2562 - protein, 18 aa, Foot-and-mouth disease virus
ALTRLALPTAPRVLATVG

SEQ ID NO: 2563 - protein, 18 aa, Foot-and-mouth disease virus
LTRLALPTAPRVLATVGE

SEQ ID NO: 2564 - protein, 18 aa, Foot-and-mouth disease virus
TRLALPTAPRVLATVGEC

SEQ ID NO: 2565 - protein, 18 aa, Foot-and-mouth disease virus
RLALPTAPRVLATVGECR

SEQ ID NO: 2566 - protein, 18 aa, Foot-and-mouth disease virus
LALPTAPRVLATVGECRY

SEQ ID NO: 2567 - protein, 18 aa, Foot-and-mouth disease virus
ALPTAPRVLATVGECRYS

SEQ ID NO: 2568 - protein, 18 aa, Foot-and-mouth disease virus
LPTAPRVLATVGECRYSR

SEQ ID NO: 2569 - protein, 18 aa, Foot-and-mouth disease virus
PTAPRVLATVGECRYSRN

SEQ ID NO: 2570 - protein, 19 aa, Foot-and-mouth disease virus
EKALDTAKALTRLALPTAP

SEQ ID NO: 2571 - protein, 19 aa, Foot-and-mouth disease virus
KALDTAKALTRLALPTAPR

SEQ ID NO: 2572 - protein, 19 aa, Foot-and-mouth disease virus
ALDTAKALTRLALPTAPRV

SEQ ID NO: 2573 - protein, 19 aa, Foot-and-mouth disease virus
LDTAKALTRLALPTAPRVL

SEQ ID NO: 2574 - protein, 19 aa, Foot-and-mouth disease virus
DTAKALTRLALPTAPRVLA

SEQ ID NO: 2575 - protein, 19 aa, Foot-and-mouth disease virus
TAKALTRLALPTAPRVLAT

SEQ ID NO: 2576 - protein, 19 aa, Foot-and-mouth disease virus
AKALTRLALPTAPRVLATV

SEQ ID NO: 2577 - protein, 19 aa, Foot-and-mouth disease virus
KALTRLALPTAPRVLATVG

SEQ ID NO: 2578 - protein, 19 aa, Foot-and-mouth disease virus
ALTRLALPTAPRVLATVGE

SEQ ID NO: 2579 - protein, 19 aa, Foot-and-mouth disease virus
LTRLALPTAPRVLATVGEC

SEQ ID NO: 2580 - protein, 19 aa, Foot-and-mouth disease virus
TRLALPTAPRVLATVGECR

SEQ ID NO: 2581 - protein, 19 aa, Foot-and-mouth disease virus
RLALPTAPRVLATVGECRY

SEQ ID NO: 2582 - protein, 19 aa, Foot-and-mouth disease virus
LALPTAPRVLATVGECRYS

SEQ ID NO: 2583 - protein, 19 aa, Foot-and-mouth disease virus
ALPTAPRVLATVGECRYSR

SEQ ID NO: 2584 - protein, 19 aa, Foot-and-mouth disease virus
LPTAPRVLATVGECRYSRN

SEQ ID NO: 2585 - protein, 19 aa, Foot-and-mouth disease virus
PTAPRVLATVGECRYSRNA

SEQ ID NO: 2586 - protein, 20 aa, Foot-and-mouth disease virus
PEKALDTAKALTRLALPTAP

SEQ ID NO: 2587 - protein, 20 aa, Foot-and-mouth disease virus
EKALDTAKALTRLALPTAPR

SEQ ID NO: 2588 - protein, 20 aa, Foot-and-mouth disease virus
KALDTAKALTRLALPTAPRV

SEQ ID NO: 2589 - protein, 20 aa, Foot-and-mouth disease virus
ALDTAKALTRLALPTAPRVL

SEQ ID NO: 2590 - protein, 20 aa, Foot-and-mouth disease virus
LDTAKALTRLALPTAPRVLA

SEQ ID NO: 2591 - protein, 20 aa, Foot-and-mouth disease virus
DTAKALTRLALPTAPRVLAT

SEQ ID NO: 2592 - protein, 20 aa, Foot-and-mouth disease virus
TAKALTRLALPTAPRVLATV

SEQ ID NO: 2593 - protein, 20 aa, Foot-and-mouth disease virus
AKALTRLALPTAPRVLATVG

SEQ ID NO: 2594 - protein, 20 aa, Foot-and-mouth disease virus
KALTRLALPTAPRVLATVGE

SEQ ID NO: 2595 - protein, 20 aa, Foot-and-mouth disease virus
ALTRLALPTAPRVLATVGEC

SEQ ID NO: 2596 - protein, 20 aa, Foot-and-mouth disease virus
LTRLALPTAPRVLATVGECR

SEQ ID NO: 2597 - protein, 20 aa, Foot-and-mouth disease virus
TRLALPTAPRVLATVGECRY

SEQ ID NO: 2598 - protein, 20 aa, Foot-and-mouth disease virus
RLALPTAPRVLATVGECRYS

SEQ ID NO: 2599 - protein, 20 aa, Foot-and-mouth disease virus
LALPTAPRVLATVGECRYSR

SEQ ID NO: 2600 - protein, 20 aa, Foot-and-mouth disease virus
ALPTAPRVLATVGECRYSRN

SEQ ID NO: 2601 - protein, 20 aa, Foot-and-mouth disease virus
LPTAPRVLATVGECRYSRNA

SEQ ID NO: 2602 - protein, 20 aa, Foot-and-mouth disease virus
PTAPRVLATVGECRYSRNAP

SEQ ID NO: 2603 - protein, 8 aa, Human foamy virus
PAPVPSAP

SEQ ID NO: 2604 - protein, 8 aa, Human foamy virus
APVPSAPP

SEQ ID NO: 2605 - protein, 8 aa, Human foamy virus
PVPSAPPM

SEQ ID NO: 2606 - protein, 8 aa, Human foamy virus
VPSAPPMI

SEQ ID NO: 2607 - protein, 8 aa, Human foamy virus
PSAPPMIQ

SEQ ID NO: 2608 - protein, 9 aa, Human foamy virus
LPAPVPSAP

SEQ ID NO: 2609 - protein, 9 aa, Human foamy virus
PAPVPSAPP

SEQ ID NO: 2610 - protein, 9 aa, Human foamy virus
APVPSAPPM

SEQ ID NO: 2611 - protein, 9 aa, Human foamy virus
PVPSAPPMI

SEQ ID NO: 2612 - protein, 9 aa, Human foamy virus
VPSAPPMIQ

SEQ ID NO: 2613 - protein, 9 aa, Human foamy virus
PSAPPMIQY

SEQ ID NO: 2614 - protein, 10 aa, Human foamy virus
ILPAPVPSAP

SEQ ID NO: 2615 - protein, 10 aa, Human foamy virus
LPAPVPSAPP

SEQ ID NO: 2616 - protein, 10 aa, Human foamy virus
PAPVPSAPPM

SEQ ID NO: 2617 - protein, 10 aa, Human foamy virus
APVPSAPPMI

SEQ ID NO: 2618 - protein, 10 aa, Human foamy virus
PVPSAPPMIQ

SEQ ID NO: 2619 - protein, 10 aa, Human foamy virus
VPSAPPMIQY

SEQ ID NO: 2620 - protein, 10 aa, Human foamy virus
PSAPPMIQYI

SEQ ID NO: 2621 - protein, 11 aa, Human foamy virus
EILPAPVPSAP

SEQ ID NO: 2622 - protein, 11 aa, Human foamy virus
ILPAPVPSAPP

SEQ ID NO: 2623 - protein, 11 aa, Human foamy virus
LPAPVPSAPPM

SEQ ID NO: 2624 - protein, 11 aa, Human foamy virus
PAPVPSAPPMI

SEQ ID NO: 2625 - protein, 11 aa, Human foamy virus
APVPSAPPMIQ

SEQ ID NO: 2626 - protein, 11 aa, Human foamy virus
PVPSAPPMIQY

SEQ ID NO: 2627 - protein, 11 aa, Human foamy virus
VPSAPPMIQYI

SEQ ID NO: 2628 - protein, 11 aa, Human foamy virus
PSAPPMIQYIP

SEQ ID NO: 2629 - protein, 12 aa, Human foamy virus
REILPAPVPSAP

SEQ ID NO: 2630 - protein, 12 aa, Human foamy virus
EILPAPVPSAPP

SEQ ID NO: 2631 - protein, 12 aa, Human foamy virus
ILPAPVPSAPPM

SEQ ID NO: 2632 - protein, 12 aa, Human foamy virus
LPAPVPSAPPMI

SEQ ID NO: 2633 - protein, 12 aa, Human foamy virus
PAPVPSAPPMIQ

SEQ ID NO: 2634 - protein, 12 aa, Human foamy virus
APVPSAPPMIQY

SEQ ID NO: 2635 - protein, 12 aa, Human foamy virus
PVPSAPPMIQYI

SEQ ID NO: 2636 - protein, 12 aa, Human foamy virus
VPSAPPMIQYIP

SEQ ID NO: 2637 - protein, 12 aa, Human foamy virus
PSAPPMIQYIPV

SEQ ID NO: 2638 - protein, 13 aa, Human foamy virus
RREILPAPVPSAP

SEQ ID NO: 2639 - protein, 13 aa, Human foamy virus
REILPAPVPSAPP

SEQ ID NO: 2640 - protein, 13 aa, Human foamy virus
EILPAPVPSAPPM

SEQ ID NO: 2641 - protein, 13 aa, Human foamy virus
ILPAPVPSAPPMI

SEQ ID NO: 2642 - protein, 13 aa, Human foamy virus
LPAPVPSAPPMIQ

SEQ ID NO: 2643 - protein, 13 aa, Human foamy virus
PAPVPSAPPMIQY

SEQ ID NO: 2644 - protein, 13 aa, Human foamy virus
APVPSAPPMIQYI

SEQ ID NO: 2645 - protein, 13 aa, Human foamy virus
PVPSAPPMIQYIP

SEQ ID NO: 2646 - protein, 13 aa, Human foamy virus
VPSAPPMIQYIPV

SEQ ID NO: 2647 - protein, 13 aa, Human foamy virus
PSAPPMIQYIPVP

SEQ ID NO: 2648 - protein, 14 aa, Human foamy virus
RRREILPAPVPSAP

SEQ ID NO: 2649 - protein, 14 aa, Human foamy virus
RREILPAPVPSAPP

SEQ ID NO: 2650 - protein, 14 aa, Human foamy virus
REILPAPVPSAPPM

SEQ ID NO: 2651 - protein, 14 aa, Human foamy virus
EILPAPVPSAPPMI

SEQ ID NO: 2652 - protein, 14 aa, Human foamy virus
ILPAPVPSAPPMIQ

SEQ ID NO: 2653 - protein, 14 aa, Human foamy virus
LPAPVPSAPPMIQY

SEQ ID NO: 2654 - protein, 14 aa, Human foamy virus
PAPVPSAPPMIQYI

SEQ ID NO: 2655 - protein, 14 aa, Human foamy virus
APVPSAPPMIQYIP

SEQ ID NO: 2656 - protein, 14 aa, Human foamy virus
PVPSAPPMIQYIPV

SEQ ID NO: 2657 - protein, 14 aa, Human foamy virus
VPSAPPMIQYIPVP

SEQ ID NO: 2658 - protein, 14 aa, Human foamy virus
PSAPPMIQYIPVPP

SEQ ID NO: 2659 - protein, 15 aa, Human foamy virus
ERRREILPAPVPSAP

SEQ ID NO: 2660 - protein, 15 aa, Human foamy virus
RRREILPAPVPSAPP

SEQ ID NO: 2661 - protein, 15 aa, Human foamy virus
RREILPAPVPSAPPM

SEQ ID NO: 2662 - protein, 15 aa, Human foamy virus
REILPAPVPSAPPMI

SEQ ID NO: 2663 - protein, 15 aa, Human foamy virus
EILPAPVPSAPPMIQ

SEQ ID NO: 2664 - protein, 15 aa, Human foamy virus
ILPAPVPSAPPMIQY

SEQ ID NO: 2665 - protein, 15 aa, Human foamy virus
LPAPVPSAPPMIQYI

SEQ ID NO: 2666 - protein, 15 aa, Human foamy virus
PAPVPSAPPMIQYIP

SEQ ID NO: 2667 - protein, 15 aa, Human foamy virus
APVPSAPPMIQYIPV

SEQ ID NO: 2668 - protein, 15 aa, Human foamy virus
PVPSAPPMIQYIPVP

SEQ ID NO: 2669 - protein, 15 aa, Human foamy virus
VPSAPPMIQYIPVPP

SEQ ID NO: 2670 - protein, 15 aa, Human foamy virus
PSAPPMIQYIPVPPP

SEQ ID NO: 2671 - protein, 16 aa, Human foamy virus
RERRREILPAPVPSAP

SEQ ID NO: 2672 - protein, 16 aa, Human foamy virus
ERRREILPAPVPSAPP

SEQ ID NO: 2673 - protein, 16 aa, Human foamy virus
RRREILPAPVPSAPPM

SEQ ID NO: 2674 - protein, 16 aa, Human foamy virus
RREILPAPVPSAPPMI

SEQ ID NO: 2675 - protein, 16 aa, Human foamy virus
REILPAPVPSAPPMIQ

SEQ ID NO: 2676 - protein, 16 aa, Human foamy virus
EILPAPVPSAPPMIQY

SEQ ID NO: 2677 - protein, 16 aa, Human foamy virus
ILPAPVPSAPPMIQYI

SEQ ID NO: 2678 - protein, 16 aa, Human foamy virus
LPAPVPSAPPMIQYIP

SEQ ID NO: 2679 - protein, 16 aa, Human foamy virus
PAPVPSAPPMIQYIPV

SEQ ID NO: 2680 - protein, 16 aa, Human foamy virus
APVPSAPPMIQYIPVP

SEQ ID NO: 2681 - protein, 16 aa, Human foamy virus
PVPSAPPMIQYIPVPP

SEQ ID NO: 2682 - protein, 16 aa, Human foamy virus
VPSAPPMIQYIPVPPP

SEQ ID NO: 2683 - protein, 16 aa, Human foamy virus
PSAPPMIQYIPVPPPP

SEQ ID NO: 2684 - protein, 17 aa, Human foamy virus
SRERRREILPAPVPSAP

SEQ ID NO: 2685 - protein, 17 aa, Human foamy virus
RERRREILPAPVPSAPP

SEQ ID NO: 2686 - protein, 17 aa, Human foamy virus
ERRREILPAPVPSAPPM

SEQ ID NO: 2687 - protein, 17 aa, Human foamy virus
RRREILPAPVPSAPPMI

SEQ ID NO: 2688 - protein, 17 aa, Human foamy virus
RREILPAPVPSAPPMIQ

SEQ ID NO: 2689 - protein, 17 aa, Human foamy virus
REILPAPVPSAPPMIQY

SEQ ID NO: 2690 - protein, 17 aa, Human foamy virus
EILPAPVPSAPPMIQYI

SEQ ID NO: 2691 - protein, 17 aa, Human foamy virus
ILPAPVPSAPPMIQYIP

SEQ ID NO: 2692 - protein, 17 aa, Human foamy virus
LPAPVPSAPPMIQYIPV

SEQ ID NO: 2693 - protein, 17 aa, Human foamy virus
PAPVPSAPPMIQYIPVP

SEQ ID NO: 2694 - protein, 17 aa, Human foamy virus
APVPSAPPMIQYIPVPP

SEQ ID NO: 2695 - protein, 17 aa, Human foamy virus
PVPSAPPMIQYIPVPPP

SEQ ID NO: 2696 - protein, 17 aa, Human foamy virus
VPSAPPMIQYIPVPPPP

SEQ ID NO: 2697 - protein, 17 aa, Human foamy virus
PSAPPMIQYIPVPPPPP

SEQ ID NO: 2698 - protein, 18 aa, Human foamy virus
QSRERRREILPAPVPSAP

SEQ ID NO: 2699 - protein, 18 aa, Human foamy virus
SRERRREILPAPVPSAPP

SEQ ID NO: 2700 - protein, 18 aa, Human foamy virus
RERRREILPAPVPSAPPM

SEQ ID NO: 2701 - protein, 18 aa, Human foamy virus
ERRREILPAPVPSAPPMI

SEQ ID NO: 2702 - protein, 18 aa, Human foamy virus
RRREILPAPVPSAPPMIQ

SEQ ID NO: 2703 - protein, 18 aa, Human foamy virus
RREILPAPVPSAPPMIQY

SEQ ID NO: 2704 - protein, 18 aa, Human foamy virus
REILPAPVPSAPPMIQYI

SEQ ID NO: 2705 - protein, 18 aa, Human foamy virus
EILPAPVPSAPPMIQYIP

SEQ ID NO: 2706 - protein, 18 aa, Human foamy virus
ILPAPVPSAPPMIQYIPV

SEQ ID NO: 2707 - protein, 18 aa, Human foamy virus
LPAPVPSAPPMIQYIPVP

SEQ ID NO: 2708 - protein, 18 aa, Human foamy virus
PAPVPSAPPMIQYIPVPP

SEQ ID NO: 2709 - protein, 18 aa, Human foamy virus
APVPSAPPMIQYIPVPPP

SEQ ID NO: 2710 - protein, 18 aa, Human foamy virus
PVPSAPPMIQYIPVPPPP

SEQ ID NO: 2711 - protein, 18 aa, Human foamy virus
VPSAPPMIQYIPVPPPPP

SEQ ID NO: 2712 - protein, 18 aa, Human foamy virus
PSAPPMIQYIPVPPPPPI

SEQ ID NO: 2713 - protein, 19 aa, Human foamy virus
SQSRERRREILPAPVPSAP

SEQ ID NO: 2714 - protein, 19 aa, Human foamy virus
QSRERRREILPAPVPSAPP

SEQ ID NO: 2715 - protein, 19 aa, Human foamy virus
SRERRREILPAPVPSAPPM

SEQ ID NO: 2716 - protein, 19 aa, Human foamy virus
RERRREILPAPVPSAPPMI

SEQ ID NO: 2717 - protein, 19 aa, Human foamy virus
ERRREILPAPVPSAPPMIQ

SEQ ID NO: 2718 - protein, 19 aa, Human foamy virus
RRREILPAPVPSAPPMIQY

SEQ ID NO: 2719 - protein, 19 aa, Human foamy virus
RREILPAPVPSAPPMIQYI

SEQ ID NO: 2720 - protein, 19 aa, Human foamy virus
REILPAPVPSAPPMIQYIP

SEQ ID NO: 2721 - protein, 19 aa, Human foamy virus
EILPAPVPSAPPMIQYIPV

SEQ ID NO: 2722 - protein, 19 aa, Human foamy virus
ILPAPVPSAPPMIQYIPVP

SEQ ID NO: 2723 - protein, 19 aa, Human foamy virus
LPAPVPSAPPMIQYIPVPP

SEQ ID NO: 2724 - protein, 19 aa, Human foamy virus
PAPVPSAPPMIQYIPVPPP

SEQ ID NO: 2725 - protein, 19 aa, Human foamy virus
APVPSAPPMIQYIPVPPPP

SEQ ID NO: 2726 - protein, 19 aa, Human foamy virus
PVPSAPPMIQYIPVPPPPP

SEQ ID NO: 2727 - protein, 19 aa, Human foamy virus
VPSAPPMIQYIPVPPPPPI

SEQ ID NO: 2728 - protein, 19 aa, Human foamy virus
PSAPPMIQYIPVPPPPPIG

SEQ ID NO: 2729 - protein, 20 aa, Human foamy virus
RSQSRERRREILPAPVPSAP

SEQ ID NO: 2730 - protein, 20 aa, Human foamy virus
SQSRERRREILPAPVPSAPP

SEQ ID NO: 2731 - protein, 20 aa, Human foamy virus
QSRERRREILPAPVPSAPPM

SEQ ID NO: 2732 - protein, 20 aa, Human foamy virus
SRERRREILPAPVPSAPPMI

SEQ ID NO: 2733 - protein, 20 aa, Human foamy virus
RERRREILPAPVPSAPPMIQ

SEQ ID NO: 2734 - protein, 20 aa, Human foamy virus
ERRREILPAPVPSAPPMIQY

SEQ ID NO: 2735 - protein, 20 aa, Human foamy virus
RRREILPAPVPSAPPMIQYI

SEQ ID NO: 2736 - protein, 20 aa, Human foamy virus
RREILPAPVPSAPPMIQYIP

SEQ ID NO: 2737 - protein, 20 aa, Human foamy virus
REILPAPVPSAPPMIQYIPV

SEQ ID NO: 2738 - protein, 20 aa, Human foamy virus
EILPAPVPSAPPMIQYIPVP

SEQ ID NO: 2739 - protein, 20 aa, Human foamy virus
ILPAPVPSAPPMIQYIPVPP

SEQ ID NO: 2740 - protein, 20 aa, Human foamy virus
LPAPVPSAPPMIQYIPVPPP

SEQ ID NO: 2741 - protein, 20 aa, Human foamy virus
PAPVPSAPPMIQYIPVPPPP

SEQ ID NO: 2742 - protein, 20 aa, Human foamy virus
APVPSAPPMIQYIPVPPPPP

SEQ ID NO: 2743 - protein, 20 aa, Human foamy virus
PVPSAPPMIQYIPVPPPPPI

SEQ ID NO: 2744 - protein, 20 aa, Human foamy virus
VPSAPPMIQYIPVPPPPPIG

SEQ ID NO: 2745 - protein, 20 aa, Human foamy virus
PSAPPMIQYIPVPPPPPIGT

SEQ ID NO: 2746 - protein, 8 aa, Hepatitis E virus
GVTRPSAP

SEQ ID NO: 2747 - protein, 8 aa, Hepatitis E virus
VTRPSAPP

SEQ ID NO: 2748 - protein, 8 aa, Hepatitis E virus
TRPSAPPL

SEQ ID NO: 2749 - protein, 8 aa, Hepatitis E virus
RPSAPPLP

SEQ ID NO: 2750 - protein, 8 aa, Hepatitis E virus
PSAPPLPH

SEQ ID NO: 2751 - protein, 9 aa, Hepatitis E virus
LGVTRPSAP

SEQ ID NO: 2752 - protein, 9 aa, Hepatitis E virus
GVTRPSAPP

SEQ ID NO: 2753 - protein, 9 aa, Hepatitis E virus
VTRPSAPPL

SEQ ID NO: 2754 - protein, 9 aa, Hepatitis E virus
TRPSAPPLP

SEQ ID NO: 2755 - protein, 9 aa, Hepatitis E virus
RPSAPPLPH

SEQ ID NO: 2756 - protein, 9 aa, Hepatitis E virus
PSAPPLPHV

SEQ ID NO: 2757 - protein, 10 aa, Hepatitis E virus
PLGVTRPSAP

SEQ ID NO: 2758 - protein, 10 aa, Hepatitis E virus
LGVTRPSAPP

SEQ ID NO: 2759 - protein, 10 aa, Hepatitis E virus
GVTRPSAPPL

SEQ ID NO: 2760 - protein, 10 aa, Hepatitis E virus
VTRPSAPPLP

SEQ ID NO: 2761 - protein, 10 aa, Hepatitis E virus
TRPSAPPLPH

SEQ ID NO: 2762 - protein, 10 aa, Hepatitis E virus
RPSAPPLPHV

SEQ ID NO: 2763 - protein, 10 aa, Hepatitis E virus
PSAPPLPHVV

SEQ ID NO: 2764 - protein, 11 aa, Hepatitis E virus
APLGVTRPSAP

SEQ ID NO: 2765 - protein, 11 aa, Hepatitis E virus
PLGVTRPSAPP

SEQ ID NO: 2766 - protein, 11 aa, Hepatitis E virus
LGVTRPSAPPL

SEQ ID NO: 2767 - protein, 11 aa, Hepatitis E virus
GVTRPSAPPLP

SEQ ID NO: 2768 - protein, 11 aa, Hepatitis E virus
VTRPSAPPLPH

SEQ ID NO: 2769 - protein, 11 aa, Hepatitis E virus
TRPSAPPLPHV

SEQ ID NO: 2770 - protein, 11 aa, Hepatitis E virus
RPSAPPLPHVV

SEQ ID NO: 2771 - protein, 11 aa, Hepatitis E virus
PSAPPLPHVVD

SEQ ID NO: 2772 - protein, 12 aa, Hepatitis E virus
SAPLGVTRPSAP

SEQ ID NO: 2773 - protein, 12 aa, Hepatitis E virus
APLGVTRPSAPP

SEQ ID NO: 2774 - protein, 12 aa, Hepatitis E virus
PLGVTRPSAPPL

SEQ ID NO: 2775 - protein, 12 aa, Hepatitis E virus
LGVTRPSAPPLP

SEQ ID NO: 2776 - protein, 12 aa, Hepatitis E virus
GVTRPSAPPLPH

SEQ ID NO: 2777 - protein, 12 aa, Hepatitis E virus
VTRPSAPPLPHV

SEQ ID NO: 2778 - protein, 12 aa, Hepatitis E virus
TRPSAPPLPHVV

SEQ ID NO: 2779 - protein, 12 aa, Hepatitis E virus
RPSAPPLPHVVD

SEQ ID NO: 2780 - protein, 12 aa, Hepatitis E virus
PSAPPLPHVVDL

SEQ ID NO: 2781 - protein, 13 aa, Hepatitis E virus
HSAPLGVTRPSAP

SEQ ID NO: 2782 - protein, 13 aa, Hepatitis E virus
SAPLGVTRPSAPP

SEQ ID NO: 2783 - protein, 13 aa, Hepatitis E virus
APLGVTRPSAPPL

SEQ ID NO: 2784 - protein, 13 aa, Hepatitis E virus
PLGVTRPSAPPLP

SEQ ID NO: 2785 - protein, 13 aa, Hepatitis E virus
LGVTRPSAPPLPH

SEQ ID NO: 2786 - protein, 13 aa, Hepatitis E virus
GVTRPSAPPLPHV

SEQ ID NO: 2787 - protein, 13 aa, Hepatitis E virus
VTRPSAPPLPHVV

SEQ ID NO: 2788 - protein, 13 aa, Hepatitis E virus
TRPSAPPLPHVVD

SEQ ID NO: 2789 - protein, 13 aa, Hepatitis E virus
RPSAPPLPHVVDL

SEQ ID NO: 2790 - protein, 13 aa, Hepatitis E virus
PSAPPLPHVVDLP

SEQ ID NO: 2791 - protein, 14 aa, Hepatitis E virus
DHSAPLGVTRPSAP

SEQ ID NO: 2792 - protein, 14 aa, Hepatitis E virus
HSAPLGVTRPSAPP

SEQ ID NO: 2793 - protein, 14 aa, Hepatitis E virus
SAPLGVTRPSAPPL

SEQ ID NO: 2794 - protein, 14 aa, Hepatitis E virus
APLGVTRPSAPPLP

SEQ ID NO: 2795 - protein, 14 aa, Hepatitis E virus
PLGVTRPSAPPLPH

SEQ ID NO: 2796 - protein, 14 aa, Hepatitis E virus
LGVTRPSAPPLPHV

SEQ ID NO: 2797 - protein, 14 aa, Hepatitis E virus
GVTRPSAPPLPHVV

SEQ ID NO: 2798 - protein, 14 aa, Hepatitis E virus
VTRPSAPPLPHVVD

SEQ ID NO: 2799 - protein, 14 aa, Hepatitis E virus
TRPSAPPLPHVVDL

SEQ ID NO: 2800 - protein, 14 aa, Hepatitis E virus
RPSAPPLPHVVDLP

SEQ ID NO: 2801 - protein, 14 aa, Hepatitis E virus
PSAPPLPHVVDLPQ

SEQ ID NO: 2802 - protein, 15 aa, Hepatitis E virus
PDHSAPLGVTRPSAP

SEQ ID NO: 2803 - protein, 15 aa, Hepatitis E virus
DHSAPLGVTRPSAPP

SEQ ID NO: 2804 - protein, 15 aa, Hepatitis E virus
HSAPLGVTRPSAPPL

SEQ ID NO: 2805 - protein, 15 aa, Hepatitis E virus
SAPLGVTRPSAPPLP

SEQ ID NO: 2806 - protein, 15 aa, Hepatitis E virus
APLGVTRPSAPPLPH

SEQ ID NO: 2807 - protein, 15 aa, Hepatitis E virus
PLGVTRPSAPPLPHV

SEQ ID NO: 2808 - protein, 15 aa, Hepatitis E virus
LGVTRPSAPPLPHVV

SEQ ID NO: 2809 - protein, 15 aa, Hepatitis E virus
GVTRPSAPPLPHVVD

SEQ ID NO: 2810 - protein, 15 aa, Hepatitis E virus
VTRPSAPPLPHVVDL

SEQ ID NO: 2811 - protein, 15 aa, Hepatitis E virus
TRPSAPPLPHVVDLP

SEQ ID NO: 2812 - protein, 15 aa, Hepatitis E virus
RPSAPPLPHVVDLPQ

SEQ ID NO: 2813 - protein, 15 aa, Hepatitis E virus
PSAPPLPHVVDLPQL

SEQ ID NO: 2814 - protein, 16 aa, Hepatitis E virus
LPDHSAPLGVTRPSAP

SEQ ID NO: 2815 - protein, 16 aa, Hepatitis E virus
PDHSAPLGVTRPSAPP

SEQ ID NO: 2816 - protein, 16 aa, Hepatitis E virus
DHSAPLGVTRPSAPPL

SEQ ID NO: 2817 - protein, 16 aa, Hepatitis E virus
HSAPLGVTRPSAPPLP

SEQ ID NO: 2818 - protein, 16 aa, Hepatitis E virus
SAPLGVTRPSAPPLPH

SEQ ID NO: 2819 - protein, 16 aa, Hepatitis E virus
APLGVTRPSAPPLPHV

SEQ ID NO: 2820 - protein, 16 aa, Hepatitis E virus
PLGVTRPSAPPLPHVV

SEQ ID NO: 2821 - protein, 16 aa, Hepatitis E virus
LGVTRPSAPPLPHVVD

SEQ ID NO: 2822 - protein, 16 aa, Hepatitis E virus
GVTRPSAPPLPHVVDL

SEQ ID NO: 2823 - protein, 16 aa, Hepatitis E virus
VTRPSAPPLPHVVDLP

SEQ ID NO: 2824 - protein, 16 aa, Hepatitis E virus
TRPSAPPLPHVVDLPQ

SEQ ID NO: 2825 - protein, 16 aa, Hepatitis E virus
RPSAPPLPHVVDLPQL

SEQ ID NO: 2826 - protein, 16 aa, Hepatitis E virus
PSAPPLPHVVDLPQLG

SEQ ID NO: 2827 - protein, 17 aa, Hepatitis E virus
NLPDHSAPLGVTRPSAP

SEQ ID NO: 2828 - protein, 17 aa, Hepatitis E virus
LPDHSAPLGVTRPSAPP

SEQ ID NO: 2829 - protein, 17 aa, Hepatitis E virus
PDHSAPLGVTRPSAPPL

SEQ ID NO: 2830 - protein, 17 aa, Hepatitis E virus
DHSAPLGVTRPSAPPLP

SEQ ID NO: 2831 - protein, 17 aa, Hepatitis E virus
HSAPLGVTRPSAPPLPH

SEQ ID NO: 2832 - protein, 17 aa, Hepatitis E virus
SAPLGVTRPSAPPLPHV

SEQ ID NO: 2833 - protein, 17 aa, Hepatitis E virus
APLGVTRPSAPPLPHVV

SEQ ID NO: 2834 - protein, 17 aa, Hepatitis E virus
PLGVTRPSAPPLPHVVD

SEQ ID NO: 2835 - protein, 17 aa, Hepatitis E virus
LGVTRPSAPPLPHVVDL

SEQ ID NO: 2836 - protein, 17 aa, Hepatitis E virus
GVTRPSAPPLPHVVDLP

SEQ ID NO: 2837 - protein, 17 aa, Hepatitis E virus
VTRPSAPPLPHVVDLPQ

SEQ ID NO: 2838 - protein, 17 aa, Hepatitis E virus
TRPSAPPLPHVVDLPQL

SEQ ID NO: 2839 - protein, 17 aa, Hepatitis E virus
RPSAPPLPHVVDLPQLG

SEQ ID NO: 2840 - protein, 17 aa, Hepatitis E virus
PSAPPLPHVVDLPQLGP

SEQ ID NO: 2841 - protein, 18 aa, Hepatitis E virus
ANLPDHSAPLGVTRPSAP

SEQ ID NO: 2842 - protein, 18 aa, Hepatitis E virus
NLPDHSAPLGVTRPSAPP

SEQ ID NO: 2843 - protein, 18 aa, Hepatitis E virus
LPDHSAPLGVTRPSAPPL

SEQ ID NO: 2844 - protein, 18 aa, Hepatitis E virus
PDHSAPLGVTRPSAPPLP

SEQ ID NO: 2845 - protein, 18 aa, Hepatitis E virus
DHSAPLGVTRPSAPPLPH

SEQ ID NO: 2846 - protein, 18 aa, Hepatitis E virus
HSAPLGVTRPSAPPLPHV

SEQ ID NO: 2847 - protein, 18 aa, Hepatitis E virus
SAPLGVTRPSAPPLPHVV

SEQ ID NO: 2848 - protein, 18 aa, Hepatitis E virus
APLGVTRPSAPPLPHVVD

SEQ ID NO: 2849 - protein, 18 aa, Hepatitis E virus
PLGVTRPSAPPLPHVVDL

SEQ ID NO: 2850 - protein, 18 aa, Hepatitis E virus
LGVTRPSAPPLPHVVDLP

SEQ ID NO: 2851 - protein, 18 aa, Hepatitis E virus
GVTRPSAPPLPHVVDLPQ

SEQ ID NO: 2852 - protein, 18 aa, Hepatitis E virus
VTRPSAPPLPHVVDLPQL

SEQ ID NO: 2853 - protein, 18 aa, Hepatitis E virus
TRPSAPPLPHVVDLPQLG

SEQ ID NO: 2854 - protein, 18 aa, Hepatitis E virus
RPSAPPLPHVVDLPQLGP

SEQ ID NO: 2855 - protein, 18 aa, Hepatitis E virus
PSAPPLPHVVDLPQLGPR

SEQ ID NO: 2856 - protein, 19 aa, Hepatitis E virus
FANLPDHSAPLGVTRPSAP

SEQ ID NO: 2857 - protein, 19 aa, Hepatitis E virus
ANLPDHSAPLGVTRPSAPP

SEQ ID NO: 2858 - protein, 19 aa, Hepatitis E virus
NLPDHSAPLGVTRPSAPPL

SEQ ID NO: 2859 - protein, 19 aa, Hepatitis E virus
LPDHSAPLGVTRPSAPPLP

SEQ ID NO: 2860 - protein, 19 aa, Hepatitis E virus
PDHSAPLGVTRPSAPPLPH

SEQ ID NO: 2861 - protein, 19 aa, Hepatitis E virus
PDHSAPLGVTRPSAPPLPH

SEQ ID NO: 2862 - protein, 19 aa, Hepatitis E virus
HSAPLGVTRPSAPPLPHVV

SEQ ID NO: 2863 - protein, 19 aa, Hepatitis E virus
SAPLGVTRPSAPPLPHVVD

SEQ ID NO: 2864 - protein, 19 aa, Hepatitis E virus
APLGVTRPSAPPLPHVVDL

SEQ ID NO: 2865 - protein, 19 aa, Hepatitis E virus
PLGVTRPSAPPLPHVVDLP

SEQ ID NO: 2866 - protein, 19 aa, Hepatitis E virus
LGVTRPSAPPLPHVVDLPQ

SEQ ID NO: 2867 - protein, 19 aa, Hepatitis E virus
GVTRPSAPPLPHVVDLPQL

SEQ ID NO: 2868 - protein, 19 aa, Hepatitis E virus
VTRPSAPPLPHVVDLPQLG

SEQ ID NO: 2869 - protein, 19 aa, Hepatitis E virus
TRPSAPPLPHVVDLPQLGP

SEQ ID NO: 2870 - protein, 19 aa, Hepatitis E virus
RPSAPPLPHVVDLPQLGPR

SEQ ID NO: 2871 - protein, 19 aa, Hepatitis E virus
PSAPPLPHVVDLPQLGPRR

SEQ ID NO: 2872 - protein, 20 aa, Hepatitis E virus
VFANLPDHSAPLGVTRPSAP

SEQ ID NO: 2873 - protein, 20 aa, Hepatitis E virus
FANLPDHSAPLGVTRPSAPP

SEQ ID NO: 2874 - protein, 20 aa, Hepatitis E virus
ANLPDHSAPLGVTRPSAPPL

SEQ ID NO: 2875 - protein, 20 aa, Hepatitis E virus
NLPDHSAPLGVTRPSAPPLP

SEQ ID NO: 2876 - protein, 20 aa, Hepatitis E virus
LPDHSAPLGVTRPSAPPLPH

SEQ ID NO: 2877 - protein, 20 aa, Hepatitis E virus
PDHSAPLGVTRPSAPPLPHV

SEQ ID NO: 2878 - protein, 20 aa, Hepatitis E virus
DHSAPLGVTRPSAPPLPHVV

SEQ ID NO: 2879 - protein, 20 aa, Hepatitis E virus
HSAPLGVTRPSAPPLPHVVD

SEQ ID NO: 2880 - protein, 20 aa, Hepatitis E virus
SAPLGVTRPSAPPLPHVVDL

SEQ ID NO: 2881 - protein, 20 aa, Hepatitis E virus
APLGVTRPSAPPLPHVVDLP

SEQ ID NO: 2882 - protein, 20 aa, Hepatitis E virus
PLGVTRPSAPPLPHVVDLPQ

SEQ ID NO: 2883 - protein, 20 aa, Hepatitis E virus
LGVTRPSAPPLPHVVDLPQL

SEQ ID NO: 2884 - protein, 20 aa, Hepatitis E virus
GVTRPSAPPLPHVVDLPQLG

SEQ ID NO: 2885 - protein, 20 aa, Hepatitis E virus
VTRPSAPPLPHVVDLPQLGP

SEQ ID NO: 2886 - protein, 20 aa, Hepatitis E virus
TRPSAPPLPHVVDLPQLGPR

SEQ ID NO: 2887 - protein, 20 aa, Hepatitis E virus
RPSAPPLPHVVDLPQLGPRR

SEQ ID NO: 2888 - protein, 8 aa, Hepatitis G virus
PGFVPTAP

SEQ ID NO: 2889 - protein, 8 aa, Hepatitis G virus
GFVPTAPV

SEQ ID NO: 2890 - protein, 8 aa, Hepatitis G virus
FVPTAPVV

SEQ ID NO: 2891 - protein, 8 aa, Hepatitis G virus
VPTAPVVI

SEQ ID NO: 2892 - protein, 8 aa, Hepatitis G virus
PTAPVVIR

SEQ ID NO: 2893 - protein, 9 aa, Hepatitis G virus
PPGFVPTAP

SEQ ID NO: 2894 - protein, 9 aa, Hepatitis G virus
PGFVPTAPV

SEQ ID NO: 2895 - protein, 9 aa, Hepatitis G virus
GFVPTAPVV

SEQ ID NO: 2896 - protein, 9 aa, Hepatitis G virus
FVPTAPVVI

SEQ ID NO: 2897 - protein, 9 aa, Hepatitis G virus
VPTAPVVIR

SEQ ID NO: 2898 - protein, 9 aa, Hepatitis G virus
PTAPVVIRR

SEQ ID NO: 2899 - protein, 10 aa, Hepatitis G virus
LPPGFVPTAP

SEQ ID NO: 2900 - protein, 10 aa, Hepatitis G virus
PPGFVPTAPV

SEQ ID NO: 2901 - protein, 10 aa, Hepatitis G virus
PGFVPTAPVV

SEQ ID NO: 2902 - protein, 10 aa, Hepatitis G virus
GFVPTAPVVI

SEQ ID NO: 2903 - protein, 10 aa, Hepatitis G virus
FVPTAPVVIR

SEQ ID NO: 2904 - protein, 10 aa, Hepatitis G virus
VPTAPVVIRR

SEQ ID NO: 2905 - protein, 10 aa, Hepatitis G virus
PTAPVVIRRC

SEQ ID NO: 2906 - protein, 11 aa, Hepatitis G virus
HLPPGFVPTAP

SEQ ID NO: 2907 - protein, 11 aa, Hepatitis G virus
LPPGFVPTAPV

SEQ ID NO: 2908 - protein, 11 aa, Hepatitis G virus
PPGFVPTAPVV

SEQ ID NO: 2909 - protein, 11 aa, Hepatitis G virus
PGFVPTAPVVI

SEQ ID NO: 2910 - protein, 11 aa, Hepatitis G virus
GFVPTAPVVIR

SEQ ID NO: 2911 - protein, 11 aa, Hepatitis G virus
FVPTAPVVIRR

SEQ ID NO: 2912 - protein, 11 aa, Hepatitis G virus
VPTAPVVIRRC

SEQ ID NO: 2913 - protein, 11 aa, Hepatitis G virus
PTAPVVIRRCG

SEQ ID NO: 2914 - protein, 12 aa, Hepatitis G virus
NHLPPGFVPTAP

SEQ ID NO: 2915 - protein, 12 aa, Hepatitis G virus
HLPPGFVPTAPV

SEQ ID NO: 2916 - protein, 12 aa, Hepatitis G virus
LPPGFVPTAPVV

SEQ ID NO: 2917 - protein, 12 aa, Hepatitis G virus
PPGFVPTAPVVI

SEQ ID NO: 2918 - protein, 12 aa, Hepatitis G virus
PGFVPTAPVVIR

SEQ ID NO: 2919 - protein, 12 aa, Hepatitis G virus
GFVPTAPVVIRR

SEQ ID NO: 2920 - protein, 12 aa, Hepatitis G virus
FVPTAPVVIRRC

SEQ ID NO: 2921 - protein, 12 aa, Hepatitis G virus
VPTAPVVIRRCG

SEQ ID NO: 2922 - protein, 12 aa, Hepatitis G virus
PTAPVVIRRCGK

SEQ ID NO: 2923 - protein, 13 aa, Hepatitis G virus
VNHLPPGFVPTAP

SEQ ID NO: 2924 - protein, 13 aa, Hepatitis G virus
NHLPPGFVPTAPV

SEQ ID NO: 2925 - protein, 13 aa, Hepatitis G virus
HLPPGFVPTAPVV

SEQ ID NO: 2926 - protein, 13 aa, Hepatitis G virus
LPPGFVPTAPVVI

SEQ ID NO: 2927 - protein, 13 aa, Hepatitis G virus
PPGFVPTAPVVIR

SEQ ID NO: 2928 - protein, 13 aa, Hepatitis G virus
PGFVPTAPVVIRR

SEQ ID NO: 2929 - protein, 13 aa, Hepatitis G virus
GFVPTAPVVIRRC

SEQ ID NO: 2930 - protein, 13 aa, Hepatitis G virus
FVPTAPVVIRRCG

SEQ ID NO: 2931 - protein, 13 aa, Hepatitis G virus
VPTAPVVIRRCGK

SEQ ID NO: 2932 - protein, 13 aa, Hepatitis G virus
PTAPVVIRRCGKG

SEQ ID NO: 2933 - protein, 14 aa, Hepatitis G virus
DVNHLPPGFVPTAP

SEQ ID NO: 2934 - protein, 14 aa, Hepatitis G virus
VNHLPPGFVPTAPV

SEQ ID NO: 2935 - protein, 14 aa, Hepatitis G virus
NHLPPGFVPTAPVV

SEQ ID NO: 2936 - protein, 14 aa, Hepatitis G virus
HLPPGFVPTAPVVI

SEQ ID NO: 2937 - protein, 14 aa, Hepatitis G virus
LPPGFVPTAPVVIR

SEQ ID NO: 2938 - protein, 14 aa, Hepatitis G virus
PPGFVPTAPVVIRR

SEQ ID NO: 2939 - protein, 14 aa, Hepatitis G virus
PGFVPTAPVVIRRC

SEQ ID NO: 2940 - protein, 14 aa, Hepatitis G virus
GFVPTAPVVIRRCG

SEQ ID NO: 2941 - protein, 14 aa, Hepatitis G virus
FVPTAPVVIRRCGK

SEQ ID NO: 2942 - protein, 14 aa, Hepatitis G virus
VPTAPVVIRRCGKG

SEQ ID NO: 2943 - protein, 14 aa, Hepatitis G virus
PTAPVVIRRCGKGF

SEQ ID NO: 2944 - protein, 15 aa, Hepatitis G virus
QDVNHLPPGFVPTAP

SEQ ID NO: 2945 - protein, 15 aa, Hepatitis G virus
DVNHLPPGFVPTAPV

SEQ ID NO: 2946 - protein, 15 aa, Hepatitis G virus
VNHLPPGFVPTAPVV

SEQ ID NO: 2947 - protein, 15 aa, Hepatitis G virus
NHLPPGFVPTAPVVI

SEQ ID NO: 2948 - protein, 15 aa, Hepatitis G virus
HLPPGFVPTAPVVIR

SEQ ID NO: 2949 - protein, 15 aa, Hepatitis G virus
LPPGFVPTAPVVIRR

SEQ ID NO: 2950 - protein, 15 aa, Hepatitis G virus
PPGFVPTAPVVIRRC

SEQ ID NO: 2951 - protein, 15 aa, Hepatitis G virus
PGFVPTAPVVIRRCG

SEQ ID NO: 2952 - protein, 15 aa, Hepatitis G virus
GFVPTAPVVIRRCGK

SEQ ID NO: 2953 - protein, 15 aa, Hepatitis G virus
FVPTAPVVIRRCGKG

SEQ ID NO: 2954 - protein, 15 aa, Hepatitis G virus
VPTAPVVIRRCGKGF

SEQ ID NO: 2955 - protein, 15 aa, Hepatitis G virus
PTAPVVIRRCGKGFL

SEQ ID NO: 2956 - protein, 16 aa, Hepatitis G virus
FQDVNHLPPGFVPTAP

SEQ ID NO: 2957 - protein, 16 aa, Hepatitis G virus
QDVNHLPPGFVPTAPV

SEQ ID NO: 2958 - protein, 16 aa, Hepatitis G virus
DVNHLPPGFVPTAPVV

SEQ ID NO: 2959 - protein, 16 aa, Hepatitis G virus
VNHLPPGFVPTAPVVI

SEQ ID NO: 2960 - protein, 16 aa, Hepatitis G virus
NHLPPGFVPTAPVVIR

SEQ ID NO: 2961 - protein, 16 aa, Hepatitis G virus
HLPPGFVPTAPVVIRR

SEQ ID NO: 2962 - protein, 16 aa, Hepatitis G virus
LPPGFVPTAPVVIRRC

SEQ ID NO: 2963 - protein, 16 aa, Hepatitis G virus
PPGFVPTAPVVIRRCG

SEQ ID NO: 2964 - protein, 16 aa, Hepatitis G virus
PGFVPTAPVVIRRCGK

SEQ ID NO: 2965 - protein, 16 aa, Hepatitis G virus
GFVPTAPVVIRRCGKG

SEQ ID NO: 2966 - protein, 16 aa, Hepatitis G virus
FVPTAPVVIRRCGKGF

SEQ ID NO: 2967 - protein, 16 aa, Hepatitis G virus
VPTAPVVIRRCGKGFL

SEQ ID NO: 2968 - protein, 16 aa, Hepatitis G virus
PTAPVVIRRCGKGFLG

SEQ ID NO: 2969 - protein, 17 aa, Hepatitis G virus
VFQDVNHLPPGFVPTAP

SEQ ID NO: 2970 - protein, 17 aa, Hepatitis G virus
FQDVNHLPPGFVPTAPV

SEQ ID NO: 2971 - protein, 17 aa, Hepatitis G virus
QDVNHLPPGFVPTAPVV

SEQ ID NO: 2972 - protein, 17 aa, Hepatitis G virus
DVNHLPPGFVPTAPVVI

SEQ ID NO: 2973 - protein, 17 aa, Hepatitis G virus
VNHLPPGFVPTAPVVIR

SEQ ID NO: 2974 - protein, 17 aa, Hepatitis G virus
NHLPPGFVPTAPVVIRR

SEQ ID NO: 2975 - protein, 17 aa, Hepatitis G virus
HLPPGFVPTAPVVIRRC

SEQ ID NO: 2976 - protein, 17 aa, Hepatitis G virus
LPPGFVPTAPVVIRRCG

SEQ ID NO: 2977 - protein, 17 aa, Hepatitis G virus
PPGFVPTAPVVIRRCGK

SEQ ID NO: 2978 - protein, 17 aa, Hepatitis G virus
PGFVPTAPVVIRRCGKG

SEQ ID NO: 2979 - protein, 17 aa, Hepatitis G virus
GFVPTAPVVIRRCGKGF

SEQ ID NO: 2980 - protein, 17 aa, Hepatitis G virus
FVPTAPVVIRRCGKGFL

SEQ ID NO: 2981 - protein, 17 aa, Hepatitis G virus
VPTAPVVIRRCGKGFLG

SEQ ID NO: 2982 - protein, 17 aa, Hepatitis G virus
PTAPVVIRRCGKGFLGV

SEQ ID NO: 2983 - protein, 18 aa, Hepatitis G virus
GVFQDVNHLPPGFVPTAP

SEQ ID NO: 2984 - protein, 18 aa, Hepatitis G virus
VFQDVNHLPPGFVPTAPV

SEQ ID NO: 2985 - protein, 18 aa, Hepatitis G virus
FQDVNHLPPGFVPTAPVV

SEQ ID NO: 2986 - protein, 18 aa, Hepatitis G virus
QDVNHLPPGFVPTAPVVI

SEQ ID NO: 2987 - protein, 18 aa, Hepatitis G virus
DVNHLPPGFVPTAPVVIR

SEQ ID NO: 2988 - protein, 18 aa, Hepatitis G virus
VNHLPPGFVPTAPVVIRR

SEQ ID NO: 2989 - protein, 18 aa, Hepatitis G virus
NHLPPGFVPTAPVVIRRC

SEQ ID NO: 2990 - protein, 18 aa, Hepatitis G virus
HLPPGFVPTAPVVIRRCG

SEQ ID NO: 2991 - protein, 18 aa, Hepatitis G virus
LPPGFVPTAPVVIRRCGK

SEQ ID NO: 2992 - protein, 18 aa, Hepatitis G virus
PPGFVPTAPVVIRRCGKG

SEQ ID NO: 2993 - protein, 18 aa, Hepatitis G virus
PGFVPTAPVVIRRCGKGF

SEQ ID NO: 2994 - protein, 18 aa, Hepatitis G virus
GFVPTAPVVIRRCGKGFL

SEQ ID NO: 2995 - protein, 18 aa, Hepatitis G virus
FVPTAPVVIRRCGKGFLG

SEQ ID NO: 2996 - protein, 18 aa, Hepatitis G virus
VPTAPVVIRRCGKGFLGV

SEQ ID NO: 2997 - protein, 18 aa, Hepatitis G virus
PTAPVVIRRCGKGFLGVT

SEQ ID NO: 2998 - protein, 19 aa, Hepatitis G virus
IGVFQDVNHLPPGFVPTAP

SEQ ID NO: 2999 - protein, 19 aa, Hepatitis G virus
GVFQDVNHLPPGFVPTAPV

SEQ ID NO: 3000 - protein, 19 aa, Hepatitis G virus
VFQDVNHLPPGFVPTAPVV

SEQ ID NO: 3001 - protein, 19 aa, Hepatitis G virus
FQDVNHLPPGFVPTAPVVI

SEQ ID NO: 3002 - protein, 19 aa, Hepatitis G virus
QDVNHLPPGFVPTAPVVIR

SEQ ID NO: 3003 - protein, 19 aa, Hepatitis G virus
DVNHLPPGFVPTAPVVIRR

SEQ ID NO: 3004 - protein, 19 aa, Hepatitis G virus
VNHLPPGFVPTAPVVIRRC

SEQ ID NO: 3005 - protein, 19 aa, Hepatitis G virus
NHLPPGFVPTAPVVIRRCG

SEQ ID NO: 3006 - protein, 19 aa, Hepatitis G virus
HLPPGFVPTAPVVIRRCGK

SEQ ID NO: 3007 - protein, 19 aa, Hepatitis G virus
LPPGFVPTAPVVIRRCGKG

SEQ ID NO: 3008 - protein, 19 aa, Hepatitis G virus
PPGFVPTAPVVIRRCGKGF

SEQ ID NO: 3009 - protein, 19 aa, Hepatitis G virus
PGFVPTAPVVIRRCGKGFL

SEQ ID NO: 3010 - protein, 19 aa, Hepatitis G virus
GFVPTAPVVIRRCGKGFLG

SEQ ID NO: 3011 - protein, 19 aa, Hepatitis G virus
FVPTAPVVIRRCGKGFLGV

SEQ ID NO: 3012 - protein, 19 aa, Hepatitis G virus
VPTAPVVIRRCGKGFLGVT

SEQ ID NO: 3013 - protein, 19 aa, Hepatitis G virus
PTAPVVIRRCGKGFLGVTK

SEQ ID NO: 3014 - protein, 20 aa, Hepatitis G virus
LIGVFQDVNHLPPGFVPTAP

SEQ ID NO: 3015 - protein, 20 aa, Hepatitis G virus
IGVFQDVNHLPPGFVPTAPV

SEQ ID NO: 3016 - protein, 20 aa, Hepatitis G virus
GVFQDVNHLPPGFVPTAPVV

SEQ ID NO: 3017 - protein, 20 aa, Hepatitis G virus
VFQDVNHLPPGFVPTAPVVI

SEQ ID NO: 3018 - protein, 20 aa, Hepatitis G virus
FQDVNHLPPGFVPTAPVVIR

SEQ ID NO: 3019 - protein, 20 aa, Hepatitis G virus
QDVNHLPPGFVPTAPVVIRR

SEQ ID NO: 3020 - protein, 20 aa, Hepatitis G virus
DVNHLPPGFVPTAPVVIRRC

SEQ ID NO: 3021 - protein, 20 aa, Hepatitis G virus
VNHLPPGFVPTAPVVIRRCG

SEQ ID NO: 3022 - protein, 20 aa, Hepatitis G virus
NHLPPGFVPTAPVVIRRCGK

SEQ ID NO: 3023 - protein, 20 aa, Hepatitis G virus
HLPPGFVPTAPVVIRRCGKG

SEQ ID NO: 3024 - protein, 20 aa, Hepatitis G virus
LPPGFVPTAPVVIRRCGKGF

SEQ ID NO: 3025 - protein, 20 aa, Hepatitis G virus
PPGFVPTAPVVIRRCGKGFL

SEQ ID NO: 3026 - protein, 20 aa, Hepatitis G virus
PGFVPTAPVVIRRCGKGFLG

SEQ ID NO: 3027 - protein, 20 aa, Hepatitis G virus
GFVPTAPVVIRRCGKGFLGV

SEQ ID NO: 3028 - protein, 20 aa, Hepatitis G virus
FVPTAPVVIRRCGKGFLGVT

SEQ ID NO: 3029 - protein, 20 aa, Hepatitis G virus
VPTAPVVIRRCGKGFLGVTK

SEQ ID NO: 3030 - protein, 20 aa, Hepatitis G virus
PTAPVVIRRCGKGFLGVTKA

SEQ ID NO: 3031 - protein, 8 aa, Human herpesvirus 5
SPWAPTAP

SEQ ID NO: 3032 - protein, 8 aa, Human herpesvirus 5
PWAPTAPL

SEQ ID NO: 3033 - protein, 8 aa, Human herpesvirus 5
WAPTAPLP

SEQ ID NO: 3034 - protein, 8 aa, Human herpesvirus 5
APTAPLPG

SEQ ID NO: 3035 - protein, 8 aa, Human herpesvirus 5
PTAPLPGD

SEQ ID NO: 3036 - protein, 9 aa, Human herpesvirus 5
NSPWAPTAP

SEQ ID NO: 3037 - protein, 9 aa, Human herpesvirus 5
SPWAPTAPL

SEQ ID NO: 3038 - protein, 9 aa, Human herpesvirus 5
PWAPTAPLP

SEQ ID NO: 3039 - protein, 9 aa, Human herpesvirus 5
WAPTAPLPG

SEQ ID NO: 3040 - protein, 9 aa, Human herpesvirus 5
APTAPLPGD

SEQ ID NO: 3041 - protein, 9 aa, Human herpesvirus 5
PTAPLPGDM

SEQ ID NO: 3042 - protein, 10 aa, Human herpesvirus 5
GNSPWAPTAP

SEQ ID NO: 3043 - protein, 10 aa, Human herpesvirus 5
NSPWAPTAPL

SEQ ID NO: 3044 - protein, 10 aa, Human herpesvirus 5
SPWAPTAPLP

SEQ ID NO: 3045 - protein, 10 aa, Human herpesvirus 5
PWAPTAPLPG

SEQ ID NO: 3046 - protein, 10 aa, Human herpesvirus 5
WAPTAPLPGD

SEQ ID NO: 3047 - protein, 10 aa, Human herpesvirus 5
APTAPLPGDM

SEQ ID NO: 3048 - protein, 10 aa, Human herpesvirus 5
PTAPLPGDMN

SEQ ID NO: 3049 - protein, 11 aa, Human herpesvirus 5
NGNSPWAPTAP

SEQ ID NO: 3050 - protein, 11 aa, Human herpesvirus 5
GNSPWAPTAPL

SEQ ID NO: 3051 - protein, 11 aa, Human herpesvirus 5
NSPWAPTAPLP

SEQ ID NO: 3052 - protein, 11 aa, Human herpesvirus 5
SPWAPTAPLPG

SEQ ID NO: 3053 - protein, 11 aa, Human herpesvirus 5
PWAPTAPLPGD

SEQ ID NO: 3054 - protein, 11 aa, Human herpesvirus 5
WAPTAPLPGDM

SEQ ID NO: 3055 - protein, 11 aa, Human herpesvirus 5
APTAPLPGDMN

SEQ ID NO: 3056 - protein, 11 aa, Human herpesvirus 5
PTAPLPGDMNP

SEQ ID NO: 3057 - protein, 12 aa, Human herpesvirus 5
VNGNSPWAPTAP

SEQ ID NO: 3058 - protein, 12 aa, Human herpesvirus 5
NGNSPWAPTAPL

SEQ ID NO: 3059 - protein, 12 aa, Human herpesvirus 5
GNSPWAPTAPLP

SEQ ID NO: 3060 - protein, 12 aa, Human herpesvirus 5
NSPWAPTAPLPG

SEQ ID NO: 3061 - protein, 12 aa, Human herpesvirus 5
SPWAPTAPLPGD

SEQ ID NO: 3062 - protein, 12 aa, Human herpesvirus 5
PWAPTAPLPGDM

SEQ ID NO: 3063 - protein, 12 aa, Human herpesvirus 5
WAPTAPLPGDMN

SEQ ID NO: 3064 - protein, 12 aa, Human herpesvirus 5
APTAPLPGDMNP

SEQ ID NO: 3065 - protein, 12 aa, Human herpesvirus 5
PTAPLPGDMNPA

SEQ ID NO: 3066 - protein, 13 aa, Human herpesvirus 5
PVNGNSPWAPTAP

SEQ ID NO: 3067 - protein, 13 aa, Human herpesvirus 5
VNGNSPWAPTAPL

SEQ ID NO: 3068 - protein, 13 aa, Human herpesvirus 5
NGNSPWAPTAPLP

SEQ ID NO: 3069 - protein, 13 aa, Human herpesvirus 5
GNSPWAPTAPLPG

SEQ ID NO: 3070 - protein, 13 aa, Human herpesvirus 5
NSPWAPTAPLPGD

SEQ ID NO: 3071 - protein, 13 aa, Human herpesvirus 5
SPWAPTAPLPGDM

SEQ ID NO: 3072 - protein, 13 aa, Human herpesvirus 5
PWAPTAPLPGDMN

SEQ ID NO: 3073 - protein, 13 aa, Human herpesvirus 5
WAPTAPLPGDMNP

SEQ ID NO: 3074 - protein, 13 aa, Human herpesvirus 5
APTAPLPGDMNPA

SEQ ID NO: 3075 - protein, 13 aa, Human herpesvirus 5
PTAPLPGDMNPAN

SEQ ID NO: 3076 - protein, 14 aa, Human herpesvirus 5
TPVNGNSPWAPTAP

SEQ ID NO: 3077 - protein, 14 aa, Human herpesvirus 5
PVNGNSPWAPTAPL

SEQ ID NO: 3078 - protein, 14 aa, Human herpesvirus 5
VNGNSPWAPTAPLP

SEQ ID NO: 3079 - protein, 14 aa, Human herpesvirus 5
NGNSPWAPTAPLPG

SEQ ID NO: 3080 - protein, 14 aa, Human herpesvirus 5
GNSPWAPTAPLPGD

SEQ ID NO: 3081 - protein, 14 aa, Human herpesvirus 5
NSPWAPTAPLPGDM

SEQ ID NO: 3082 - protein, 14 aa, Human herpesvirus 5
SPWAPTAPLPGDMN

SEQ ID NO: 3083 - protein, 14 aa, Human herpesvirus 5
PWAPTAPLPGDMNP

SEQ ID NO: 3084 - protein, 14 aa, Human herpesvirus 5
WAPTAPLPGDMNPA

SEQ ID NO: 3085 - protein, 14 aa, Human herpesvirus 5
APTAPLPGDMNPAN

SEQ ID NO: 3086 - protein, 14 aa, Human herpesvirus 5
PTAPLPGDMNPANW

SEQ ID NO: 3087 - protein, 15 aa, Human herpesvirus 5
QTPVNGNSPWAPTAP

SEQ ID NO: 3088 - protein, 15 aa, Human herpesvirus 5
TPVNGNSPWAPTAPL

SEQ ID NO: 3089 - protein, 15 aa, Human herpesvirus 5
PVNGNSPWAPTAPLP

SEQ ID NO: 3090 - protein, 15 aa, Human herpesvirus 5
VNGNSPWAPTAPLPG

SEQ ID NO: 3091 - protein, 15 aa, Human herpesvirus 5
NGNSPWAPTAPLPGD

SEQ ID NO: 3092 - protein, 15 aa, Human herpesvirus 5
GNSPWAPTAPLPGDM

SEQ ID NO: 3093 - protein, 15 aa, Human herpesvirus 5
NSPWAPTAPLPGDMN

SEQ ID NO: 3094 - protein, 15 aa, Human herpesvirus 5
SPWAPTAPLPGDMNP

SEQ ID NO: 3095 - protein, 15 aa, Human herpesvirus 5
PWAPTAPLPGDMNPA

SEQ ID NO: 3096 - protein, 15 aa, Human herpesvirus 5
WAPTAPLPGDMNPAN

SEQ ID NO: 3097 - protein, 15 aa, Human herpesvirus 5
APTAPLPGDMNPANW

SEQ ID NO: 3098 - protein, 15 aa, Human herpesvirus 5
PTAPLPGDMNPANWP

SEQ ID NO: 3099 - protein, 16 aa, Human herpesvirus 5
TQTPVNGNSPWAPTAP

SEQ ID NO: 3100 - protein, 16 aa, Human herpesvirus 5
QTPVNGNSPWAPTAPL

SEQ ID NO: 3101 - protein, 16 aa, Human herpesvirus 5
TPVNGNSPWAPTAPLP

SEQ ID NO: 3102 - protein, 16 aa, Human herpesvirus 5
PVNGNSPWAPTAPLPG

SEQ ID NO: 3103 - protein, 16 aa, Human herpesvirus 5
VNGNSPWAPTAPLPGD

SEQ ID NO: 3104 - protein, 16 aa, Human herpesvirus 5
NGNSPWAPTAPLPGDM

SEQ ID NO: 3105 - protein, 16 aa, Human herpesvirus 5
GNSPWAPTAPLPGDMN

SEQ ID NO: 3106 - protein, 16 aa, Human herpesvirus 5
NSPWAPTAPLPGDMNP

SEQ ID NO: 3107 - protein, 16 aa, Human herpesvirus 5
SPWAPTAPLPGDMNPA

SEQ ID NO: 3108 - protein, 16 aa, Human herpesvirus 5
PWAPTAPLPGDMNPAN

SEQ ID NO: 3109 - protein, 16 aa, Human herpesvirus 5
WAPTAPLPGDMNPANW

SEQ ID NO: 3110 - protein, 16 aa, Human herpesvirus 5
APTAPLPGDMNPANWP

SEQ ID NO: 3111 - protein, 16 aa, Human herpesvirus 5
PTAPLPGDMNPANWPR

SEQ ID NO: 3112 - protein, 17 aa, Human herpesvirus 5
GTQTPVNGNSPWAPTAP

SEQ ID NO: 3113 - protein, 17 aa, Human herpesvirus 5
TQTPVNGNSPWAPTAPL

SEQ ID NO: 3114 - protein, 17 aa, Human herpesvirus 5
QTPVNGNSPWAPTAPLP

SEQ ID NO: 3115 - protein, 17 aa, Human herpesvirus 5
TPVNGNSPWAPTAPLPG

SEQ ID NO: 3116 - protein, 17 aa, Human herpesvirus 5
PVNGNSPWAPTAPLPGD

SEQ ID NO: 3117 - protein, 17 aa, Human herpesvirus 5
VNGNSPWAPTAPLPGDM

SEQ ID NO: 3118 - protein, 17 aa, Human herpesvirus 5
NGNSPWAPTAPLPGDMN

SEQ ID NO: 3119 - protein, 17 aa, Human herpesvirus 5
GNSPWAPTAPLPGDMNP

SEQ ID NO: 3120 - protein, 17 aa, Human herpesvirus 5
NSPWAPTAPLPGDMNPA

SEQ ID NO: 3121 - protein, 17 aa, Human herpesvirus 5
SPWAPTAPLPGDMNPAN

SEQ ID NO: 3122 - protein, 17 aa, Human herpesvirus 5
PWAPTAPLPGDMNPANW

SEQ ID NO: 3123 - protein, 17 aa, Human herpesvirus 5
WAPTAPLPGDMNPANWP

SEQ ID NO: 3124 - protein, 17 aa, Human herpesvirus 5
APTAPLPGDMNPANWPR

SEQ ID NO: 3125 - protein, 17 aa, Human herpesvirus 5
PTAPLPGDMNPANWPRE

SEQ ID NO: 3126 - protein, 18 aa, Human herpesvirus 5
AGTQTPVNGNSPWAPTAP

SEQ ID NO: 3127 - protein, 18 aa, Human herpesvirus 5
GTQTPVNGNSPWAPTAPL

SEQ ID NO: 3128 - protein, 18 aa, Human herpesvirus 5
TQTPVNGNSPWAPTAPLP

SEQ ID NO: 3129 - protein, 18 aa, Human herpesvirus 5
QTPVNGNSPWAPTAPLPG

SEQ ID NO: 3130 - protein, 18 aa, Human herpesvirus 5
TPVNGNSPWAPTAPLPGD

SEQ ID NO: 3131 - protein, 18 aa, Human herpesvirus 5
PVNGNSPWAPTAPLPGDM

SEQ ID NO: 3132 - protein, 18 aa, Human herpesvirus 5
VNGNSPWAPTAPLPGDMN

SEQ ID NO: 3133 - protein, 18 aa, Human herpesvirus 5
NGNSPWAPTAPLPGDMNP

SEQ ID NO: 3134 - protein, 18 aa, Human herpesvirus 5
GNSPWAPTAPLPGDMNPA

SEQ ID NO: 3135 - protein, 18 aa, Human herpesvirus 5
NSPWAPTAPLPGDMNPAN

SEQ ID NO: 3136 - protein, 18 aa, Human herpesvirus 5
SPWAPTAPLPGDMNPANW

SEQ ID NO: 3137 - protein, 18 aa, Human herpesvirus 5
PWAPTAPLPGDMNPANWP

SEQ ID NO: 3138 - protein, 18 aa, Human herpesvirus 5
WAPTAPLPGDMNPANWPR

SEQ ID NO: 3139 - protein, 18 aa, Human herpesvirus 5
APTAPLPGDMNPANWPRE

SEQ ID NO: 3140 - protein, 18 aa, Human herpesvirus 5
PTAPLPGDMNPANWPRER

SEQ ID NO: 3141 - protein, 19 aa, Human herpesvirus 5
FAGTQTPVNGNSPWAPTAP

SEQ ID NO: 3142 - protein, 19 aa, Human herpesvirus 5
AGTQTPVNGNSPWAPTAPL

SEQ ID NO: 3143 - protein, 19 aa, Human herpesvirus 5
GTQTPVNGNSPWAPTAPLP

SEQ ID NO: 3144 - protein, 19 aa, Human herpesvirus 5
TQTPVNGNSPWAPTAPLPG

SEQ ID NO: 3145 - protein, 19 aa, Human herpesvirus 5
QTPVNGNSPWAPTAPLPGD

SEQ ID NO: 3146 - protein, 19 aa, Human herpesvirus 5
TPVNGNSPWAPTAPLPGDM

SEQ ID NO: 3147 - protein, 19 aa, Human herpesvirus 5
PVNGNSPWAPTAPLPGDMN

SEQ ID NO: 3148 - protein, 19 aa, Human herpesvirus 5
VNGNSPWAPTAPLPGDMNP

SEQ ID NO: 3149 - protein, 19 aa, Human herpesvirus 5
NGNSPWAPTAPLPGDMNPA

SEQ ID NO: 3150 - protein, 19 aa, Human herpesvirus 5
GNSPWAPTAPLPGDMNPAN

SEQ ID NO: 3151 - protein, 19 aa, Human herpesvirus 5
NSPWAPTAPLPGDMNPANW

SEQ ID NO: 3152 - protein, 19 aa, Human herpesvirus 5
SPWAPTAPLPGDMNPANWP

SEQ ID NO: 3153 - protein, 19 aa, Human herpesvirus 5
PWAPTAPLPGDMNPANWPR

SEQ ID NO: 3154 - protein, 19 aa, Human herpesvirus 5
WAPTAPLPGDMNPANWPRE

SEQ ID NO: 3155 - protein, 19 aa, Human herpesvirus 5
APTAPLPGDMNPANWPRER

SEQ ID NO: 3156 - protein, 19 aa, Human herpesvirus 5
PTAPLPGDMNPANWPRERA

SEQ ID NO: 3157 - protein, 20 aa, Human herpesvirus 5
TFAGTQTPVNGNSPWAPTAP

SEQ ID NO: 3158 - protein, 20 aa, Human herpesvirus 5
FAGTQTPVNGNSPWAPTAPL

SEQ ID NO: 3159 - protein, 20 aa, Human herpesvirus 5
AGTQTPVNGNSPWAPTAPLP

SEQ ID NO: 3160 - protein, 20 aa, Human herpesvirus 5
GTQTPVNGNSPWAPTAPLPG

SEQ ID NO: 3161 - protein, 20 aa, Human herpesvirus 5
TQTPVNGNSPWAPTAPLPGD

SEQ ID NO: 3162 - protein, 20 aa, Human herpesvirus 5
QTPVNGNSPWAPTAPLPGDM

SEQ ID NO: 3163 - protein, 20 aa, Human herpesvirus 5
TPVNGNSPWAPTAPLPGDMN

SEQ ID NO: 3164 - protein, 20 aa, Human herpesvirus 5
PVNGNSPWAPTAPLPGDMNP

SEQ ID NO: 3165 - protein, 20 aa, Human herpesvirus 5
VNGNSPWAPTAPLPGDMNPA

SEQ ID NO: 3166 - protein, 20 aa, Human herpesvirus 5
NGNSPWAPTAPLPGDMNPAN

SEQ ID NO: 3167 - protein, 20 aa, Human herpesvirus 5
GNSPWAPTAPLPGDMNPANW

SEQ ID NO: 3168 - protein, 20 aa, Human herpesvirus 5
NSPWAPTAPLPGDMNPANWP

SEQ ID NO: 3169 - protein, 20 aa, Human herpesvirus 5
SPWAPTAPLPGDMNPANWPR

SEQ ID NO: 3170 - protein, 20 aa, Human herpesvirus 5
PWAPTAPLPGDMNPANWPRE

SEQ ID NO: 3171 - protein, 20 aa, Human herpesvirus 5
WAPTAPLPGDMNPANWPRER

SEQ ID NO: 3172 - protein, 20 aa, Human herpesvirus 5
APTAPLPGDMNPANWPRERA

SEQ ID NO: 3173 - protein, 20 aa, Human herpesvirus 5
PTAPLPGDMNPANWPRERAW

SEQ ID NO: 3174 - protein, 8 aa, Human parechovirus 2
LTQHPSAP

SEQ ID NO: 3175 - protein, 8 aa, Human parechovirus 2
TQHPSAPT

SEQ ID NO: 3176 - protein, 8 aa, Human parechovirus 2
QHPSAPTL

SEQ ID NO: 3177 - protein, 8 aa, Human parechovirus 2
HPSAPTLP

SEQ ID NO: 3178 - protein, 8 aa, Human parechovirus 2
PSAPTLPF

SEQ ID NO: 3179 - protein, 9 aa, Human parechovirus 2
NLTQHPSAP

SEQ ID NO: 3180 - protein, 9 aa, Human parechovirus 2
LTQHPSAPT

SEQ ID NO: 3181 - protein, 9 aa, Human parechovirus 2
TQHPSAPTL

SEQ ID NO: 3182 - protein, 9 aa, Human parechovirus 2
QHPSAPTLP

SEQ ID NO: 3183 - protein, 9 aa, Human parechovirus 2
HPSAPTLPF

SEQ ID NO: 3184 - protein, 9 aa, Human parechovirus 2
PSAPTLPFT

SEQ ID NO: 3185 - protein, 10 aa, Human parechovirus 2
TNLTQHPSAP

SEQ ID NO: 3186 - protein, 10 aa, Human parechovirus 2
NLTQHPSAPT

SEQ ID NO: 3187 - protein, 10 aa, Human parechovirus 2
LTQHPSAPTL

SEQ ID NO: 3188 - protein, 10 aa, Human parechovirus 2
TQHPSAPTLP

SEQ ID NO: 3189 - protein, 10 aa, Human parechovirus 2
QHPSAPTLPF

SEQ ID NO: 3190 - protein, 10 aa, Human parechovirus 2
HPSAPTLPFT

SEQ ID NO: 3191 - protein, 10 aa, Human parechovirus 2
PSAPTLPFTP

SEQ ID NO: 3192 - protein, 11 aa, Human parechovirus 2
TTNLTQHPSAP

SEQ ID NO: 3193 - protein, 11 aa, Human parechovirus 2
TNLTQHPSAPT

SEQ ID NO: 3194 - protein, 11 aa, Human parechovirus 2
NLTQHPSAPTL

SEQ ID NO: 3195 - protein, 11 aa, Human parechovirus 2
LTQHPSAPTLP

SEQ ID NO: 3196 - protein, 11 aa, Human parechovirus 2
TQHPSAPTLPF

SEQ ID NO: 3197 - protein, 11 aa, Human parechovirus 2
QHPSAPTLPFT

SEQ ID NO: 3198 - protein, 11 aa, Human parechovirus 2
HPSAPTLPFTP

SEQ ID NO: 3199 - protein, 11 aa, Human parechovirus 2
PSAPTLPFTPD

SEQ ID NO: 3200 - protein, 12 aa, Human parechovirus 2
NTTNLTQHPSAP

SEQ ID NO: 3201 - protein, 12 aa, Human parechovirus 2
TTNLTQHPSAPT

SEQ ID NO: 3202 - protein, 12 aa, Human parechovirus 2
TNLTQHPSAPTL

SEQ ID NO: 3203 - protein, 12 aa, Human parechovirus 2
NLTQHPSAPTLP

SEQ ID NO: 3204 - protein, 12 aa, Human parechovirus 2
LTQHPSAPTLPF

SEQ ID NO: 3205 - protein, 12 aa, Human parechovirus 2
TQHPSAPTLPFT

SEQ ID NO: 3206 - protein, 12 aa, Human parechovirus 2
QHPSAPTLPFTP

SEQ ID NO: 3207 - protein, 12 aa, Human parechovirus 2
HPSAPTLPFTPD

SEQ ID NO: 3208 - protein, 12 aa, Human parechovirus 2
PSAPTLPFTPDF

SEQ ID NO: 3209 - protein, 13 aa, Human parechovirus 2
VNTTNLTQHPSAP

SEQ ID NO: 3210 - protein, 13 aa, Human parechovirus 2
NTTNLTQHPSAPT

SEQ ID NO: 3211 - protein, 13 aa, Human parechovirus 2
TTNLTQHPSAPTL

SEQ ID NO: 3212 - protein, 13 aa, Human parechovirus 2
TNLTQHPSAPTLP

SEQ ID NO: 3213 - protein, 13 aa, Human parechovirus 2
NLTQHPSAPTLPF

SEQ ID NO: 3214 - protein, 13 aa, Human parechovirus 2
LTQHPSAPTLPFT

SEQ ID NO: 3215 - protein, 13 aa, Human parechovirus 2
TQHPSAPTLPFTP

SEQ ID NO: 3216 - protein, 13 aa, Human parechovirus 2
QHPSAPTLPFTPD

SEQ ID NO: 3217 - protein, 13 aa, Human parechovirus 2
HPSAPTLPFTPDF

SEQ ID NO: 3218 - protein, 13 aa, Human parechovirus 2
PSAPTLPFTPDFS

SEQ ID NO: 3219 - protein, 14 aa, Human parechovirus 2
TVNTTNLTQHPSAP

SEQ ID NO: 3220 - protein, 14 aa, Human parechovirus 2
VNTTNLTQHPSAPT

SEQ ID NO: 3221 - protein, 14 aa, Human parechovirus 2
NTTNLTQHPSAPTL

SEQ ID NO: 3222 - protein, 14 aa, Human parechovirus 2
TTNLTQHPSAPTLP

SEQ ID NO: 3223 - protein, 14 aa, Human parechovirus 2
TNLTQHPSAPTLPF

SEQ ID NO: 3224 - protein, 14 aa, Human parechovirus 2
NLTQHPSAPTLPFT

SEQ ID NO: 3225 - protein, 14 aa, Human parechovirus 2
LTQHPSAPTLPFTP

SEQ ID NO: 3226 - protein, 14 aa, Human parechovirus 2
TQHPSAPTLPFTPD

SEQ ID NO: 3227 - protein, 14 aa, Human parechovirus 2
QHPSAPTLPFTPDF

SEQ ID NO: 3228 - protein, 14 aa, Human parechovirus 2
HPSAPTLPFTPDFS

SEQ ID NO: 3229 - protein, 14 aa, Human parechovirus 2
PSAPTLPFTPDFSN

SEQ ID NO: 3230 - protein, 15 aa, Human parechovirus 2
TTVNTTNLTQHPSAP

SEQ ID NO: 3231 - protein, 15 aa, Human parechovirus 2
TVNTTNLTQHPSAPT

SEQ ID NO: 3232 - protein, 15 aa, Human parechovirus 2
VNTTNLTQHPSAPTL

SEQ ID NO: 3233 - protein, 15 aa, Human parechovirus 2
NTTNLTQHPSAPTLP

SEQ ID NO: 3234 - protein, 15 aa, Human parechovirus 2
TTNLTQHPSAPTLPF

SEQ ID NO: 3235 - protein, 15 aa, Human parechovirus 2
TNLTQHPSAPTLPFT

SEQ ID NO: 3236 - protein, 15 aa, Human parechovirus 2
NLTQHPSAPTLPFTP

SEQ ID NO: 3237 - protein, 15 aa, Human parechovirus 2
LTQHPSAPTLPFTPD

SEQ ID NO: 3238 - protein, 15 aa, Human parechovirus 2
TQHPSAPTLPFTPDF

SEQ ID NO: 3239 - protein, 15 aa, Human parechovirus 2
QHPSAPTLPFTPDFS

SEQ ID NO: 3240 - protein, 15 aa, Human parechovirus 2
HPSAPTLPFTPDFSN

SEQ ID NO: 3241 - protein, 15 aa, Human parechovirus 2
PSAPTLPFTPDFSNV

SEQ ID NO: 3242 - protein, 16 aa, Human parechovirus 2
TTTVNTTNLTQHPSAP

SEQ ID NO: 3243 - protein, 16 aa, Human parechovirus 2
TTVNTTNLTQHPSAPT

SEQ ID NO: 3244 - protein, 16 aa, Human parechovirus 2
TVNTTNLTQHPSAPTL

SEQ ID NO: 3245 - protein, 16 aa, Human parechovirus 2
VNTTNLTQHPSAPTLP

SEQ ID NO: 3246 - protein, 16 aa, Human parechovirus 2
NTTNLTQHPSAPTLPF

SEQ ID NO: 3247 - protein, 16 aa, Human parechovirus 2
TTNLTQHPSAPTLPFT

SEQ ID NO: 3248 - protein, 16 aa, Human parechovirus 2
TNLTQHPSAPTLPFTP

SEQ ID NO: 3249 - protein, 16 aa, Human parechovirus 2
NLTQHPSAPTLPFTPD

SEQ ID NO: 3250 - protein, 16 aa, Human parechovirus 2
LTQHPSAPTLPFTPDF

SEQ ID NO: 3251 - protein, 16 aa, Human parechovirus 2
TQHPSAPTLPFTPDFS

SEQ ID NO: 3252 - protein, 16 aa, Human parechovirus 2
QHPSAPTLPFTPDFSN

SEQ ID NO: 3253 - protein, 16 aa, Human parechovirus 2
HPSAPTLPFTPDFSNV

SEQ ID NO: 3254 - protein, 16 aa, Human parechovirus 2
PSAPTLPFTPDFSNVD

SEQ ID NO: 3255 - protein, 17 aa, Human parechovirus 2
ATTTVNTTNLTQHPSAP

SEQ ID NO: 3256 - protein, 17 aa, Human parechovirus 2
TTTVNTTNLTQHPSAPT

SEQ ID NO: 3257 - protein, 17 aa, Human parechovirus 2
TTVNTTNLTQHPSAPTL

SEQ ID NO: 3258 - protein, 17 aa, Human parechovirus 2
TVNTTNLTQHPSAPTLP

SEQ ID NO: 3259 - protein, 17 aa, Human parechovirus 2
VNTTNLTQHPSAPTLPF

SEQ ID NO: 3260 - protein, 17 aa, Human parechovirus 2
NTTNLTQHPSAPTLPFT

SEQ ID NO: 3261 - protein, 17 aa, Human parechovirus 2
TTNLTQHPSAPTLPFTP

SEQ ID NO: 3262 - protein, 17 aa, Human parechovirus 2
TNLTQHPSAPTLPFTPD

SEQ ID NO: 3263 - protein, 17 aa, Human parechovirus 2
NLTQHPSAPTLPFTPDF

SEQ ID NO: 3264 - protein, 17 aa, Human parechovirus 2
LTQHPSAPTLPFTPDFS

SEQ ID NO: 3265 - protein, 17 aa, Human parechovirus 2
TQHPSAPTLPFTPDFSN

SEQ ID NO: 3266 - protein, 17 aa, Human parechovirus 2
QHPSAPTLPFTPDFSNV

SEQ ID NO: 3267 - protein, 17 aa, Human parechovirus 2
HPSAPTLPFTPDFSNVD

SEQ ID NO: 3268 - protein, 17 aa, Human parechovirus 2
PSAPTLPFTPDFSNVDT

SEQ ID NO: 3269 - protein, 18 aa, Human parechovirus 2
QATTTVNTTNLTQHPSAP

SEQ ID NO: 3270 - protein, 18 aa, Human parechovirus 2
ATTTVNTTNLTQHPSAPT

SEQ ID NO: 3271 - protein, 18 aa, Human parechovirus 2
TTTVNTTNLTQHPSAPTL

SEQ ID NO: 3272 - protein, 18 aa, Human parechovirus 2
TTVNTTNLTQHPSAPTLP

SEQ ID NO: 3273 - protein, 18 aa, Human parechovirus 2
TVNTTNLTQHPSAPTLPF

SEQ ID NO: 3274 - protein, 18 aa, Human parechovirus 2
VNTTNLTQHPSAPTLPFT

SEQ ID NO: 3275 - protein, 18 aa, Human parechovirus 2
NTTNLTQHPSAPTLPFTP

SEQ ID NO: 3276 - protein, 18 aa, Human parechovirus 2
TTNLTQHPSAPTLPFTPD

SEQ ID NO: 3277 - protein, 18 aa, Human parechovirus 2
TNLTQHPSAPTLPFTPDF

SEQ ID NO: 3278 - protein, 18 aa, Human parechovirus 2
NLTQHPSAPTLPFTPDFS

SEQ ID NO: 3279 - protein, 18 aa, Human parechovirus 2
LTQHPSAPTLPFTPDFSN

SEQ ID NO: 3280 - protein, 18 aa, Human parechovirus 2
TQHPSAPTLPFTPDFSNV

SEQ ID NO: 3281 - protein, 18 aa, Human parechovirus 2
QHPSAPTLPFTPDFSNVD

SEQ ID NO: 3282 - protein, 18 aa, Human parechovirus 2
HPSAPTLPFTPDFSNVDT

SEQ ID NO: 3283 - protein, 18 aa, Human parechovirus 2
PSAPTLPFTPDFSNVDTF

SEQ ID NO: 3284 - protein, 19 aa, Human parechovirus 2
VQATTTVNTTNLTQHPSAP

SEQ ID NO: 3285 - protein, 19 aa, Human parechovirus 2
QATTTVNTTNLTQHPSAPT

SEQ ID NO: 3286 - protein, 19 aa, Human parechovirus 2
ATTTVNTTNLTQHPSAPTL

SEQ ID NO: 3287 - protein, 19 aa, Human parechovirus 2
TTTVNTTNLTQHPSAPTLP

SEQ ID NO: 3288 - protein, 19 aa, Human parechovirus 2
TTVNTTNLTQHPSAPTLPF

SEQ ID NO: 3289 - protein, 19 aa, Human parechovirus 2
TVNTTNLTQHPSAPTLPFT

SEQ ID NO: 3290 - protein, 19 aa, Human parechovirus 2
VNTTNLTQHPSAPTLPFTP

SEQ ID NO: 3291 - protein, 19 aa, Human parechovirus 2
NTTNLTQHPSAPTLPFTPD

SEQ ID NO: 3292 - protein, 19 aa, Human parechovirus 2
TTNLTQHPSAPTLPFTPDF

SEQ ID NO: 3293 - protein, 19 aa, Human parechovirus 2
TNLTQHPSAPTLPFTPDFS

SEQ ID NO: 3294 - protein, 19 aa, Human parechovirus 2
NLTQHPSAPTLPFTPDFSN

SEQ ID NO: 3295 - protein, 19 aa, Human parechovirus 2
LTQHPSAPTLPFTPDFSNV

SEQ ID NO: 3296 - protein, 19 aa, Human parechovirus 2
TQHPSAPTLPFTPDFSNVD

SEQ ID NO: 3297 - protein, 19 aa, Human parechovirus 2
QHPSAPTLPFTPDFSNVDT

SEQ ID NO: 3298 - protein, 19 aa, Human parechovirus 2
HPSAPTLPFTPDFSNVDTF

SEQ ID NO: 3299 - protein, 19 aa, Human parechovirus 2
PSAPTLPFTPDFSNVDTFH

SEQ ID NO: 3300 - protein, 20 aa, Human parechovirus 2
VVQATTTVNTTNLTQHPSAP

SEQ ID NO: 3301 - protein, 20 aa, Human parechovirus 2
VQATTTVNTTNLTQHPSAPT

SEQ ID NO: 3302 - protein, 20 aa, Human parechovirus 2
QATTTVNTTNLTQHPSAPTL

SEQ ID NO: 3303 - protein, 20 aa, Human parechovirus 2
ATTTVNTTNLTQHPSAPTLP

SEQ ID NO: 3304 - protein, 20 aa, Human parechovirus 2
TTTVNTTNLTQHPSAPTLPF

SEQ ID NO: 3305 - protein, 20 aa, Human parechovirus 2
TTVNTTNLTQHPSAPTLPFT

SEQ ID NO: 3306 - protein, 20 aa, Human parechovirus 2
TVNTTNLTQHPSAPTLPFTP

SEQ ID NO: 3307 - protein, 20 aa, Human parechovirus 2
VNTTNLTQHPSAPTLPFTPD

SEQ ID NO: 3308 - protein, 20 aa, Human parechovirus 2
NTTNLTQHPSAPTLPFTPDF

SEQ ID NO: 3309 - protein, 20 aa, Human parechovirus 2
TTNLTQHPSAPTLPFTPDFS

SEQ ID NO: 3310 - protein, 20 aa, Human parechovirus 2
TNLTQHPSAPTLPFTPDFSN

SEQ ID NO: 3311 - protein, 20 aa, Human parechovirus 2
NLTQHPSAPTLPFTPDFSNV

SEQ ID NO: 3312 - protein, 20 aa, Human parechovirus 2
LTQHPSAPTLPFTPDFSNVD

SEQ ID NO: 3313 - protein, 20 aa, Human parechovirus 2
TQHPSAPTLPFTPDFSNVDT

SEQ ID NO: 3314 - protein, 20 aa, Human parechovirus 2
QHPSAPTLPFTPDFSNVDTF

SEQ ID NO: 3315 - protein, 20 aa, Human parechovirus 2
HPSAPTLPFTPDFSNVDTFH

SEQ ID NO: 3316 - protein, 20 aa, Human parechovirus 2
PSAPTLPFTPDFSNVDTFHS

SEQ ID NO: 3317 - protein, 8 aa, Semliki Forest virus
LKIRPSAP

SEQ ID NO: 3318 - protein, 8 aa, Semliki Forest virus
KIRPSAPY

SEQ ID NO: 3319 - protein, 8 aa, Semliki Forest virus
IRPSAPYK

SEQ ID NO: 3320 - protein, 8 aa, Semliki Forest virus
RPSAPYKT

SEQ ID NO: 3321 - protein, 8 aa, Semliki Forest virus
PSAPYKTT

SEQ ID NO: 3322 - protein, 9 aa, Semliki Forest virus
GLKIRPSAP

SEQ ID NO: 3323 - protein, 9 aa, Semliki Forest virus
LKIRPSAPY

SEQ ID NO: 3324 - protein, 9 aa, Semliki Forest virus
KIRPSAPYK

SEQ ID NO: 3325 - protein, 9 aa, Semliki Forest virus
IRPSAPYKT

SEQ ID NO: 3326 - protein, 9 aa, Semliki Forest virus
RPSAPYKTT

SEQ ID NO: 3327 - protein, 9 aa, Semliki Forest virus
PSAPYKTTV

SEQ ID NO: 3328 - protein, 10 aa, Semliki Forest virus
EGLKIRPSAP

SEQ ID NO: 3329 - protein, 10 aa, Semliki Forest virus
GLKIRPSAPY

SEQ ID NO: 3330 - protein, 10 aa, Semliki Forest virus
LKIRPSAPYK

SEQ ID NO: 3331 - protein, 10 aa, Semliki Forest virus
KIRPSAPYKT

SEQ ID NO: 3332 - protein, 10 aa, Semliki Forest virus
IRPSAPYKTT

SEQ ID NO: 3333 - protein, 10 aa, Semliki Forest virus
RPSAPYKTTV

SEQ ID NO: 3334 - protein, 10 aa, Semliki Forest virus
PSAPYKTTVV

SEQ ID NO: 3335 - protein, 11 aa, Semliki Forest virus
YEGLKIRPSAP

SEQ ID NO: 3336 - protein, 11 aa, Semliki Forest virus
EGLKIRPSAPY

SEQ ID NO: 3337 - protein, 11 aa, Semliki Forest virus
GLKIRPSAPYK

SEQ ID NO: 3338 - protein, 11 aa, Semliki Forest virus
LKIRPSAPYKT

SEQ ID NO: 3339 - protein, 11 aa, Semliki Forest virus
KIRPSAPYKTT

SEQ ID NO: 3340 - protein, 11 aa, Semliki Forest virus
IRPSAPYKTTV

SEQ ID NO: 3341 - protein, 11 aa, Semliki Forest virus
RPSAPYKTTVV

SEQ ID NO: 3342 - protein, 11 aa, Semliki Forest virus
PSAPYKTTVVG

SEQ ID NO: 3343 - protein, 12 aa, Semliki Forest virus
AYEGLKIRPSAP

SEQ ID NO: 3344 - protein, 12 aa, Semliki Forest virus
YEGLKIRPSAPY

SEQ ID NO: 3345 - protein, 12 aa, Semliki Forest virus
EGLKIRPSAPYK

SEQ ID NO: 3346 - protein, 12 aa, Semliki Forest virus
GLKIRPSAPYKT

SEQ ID NO: 3347 - protein, 12 aa, Semliki Forest virus
LKIRPSAPYKTT

SEQ ID NO: 3348 - protein, 12 aa, Semliki Forest virus
KIRPSAPYKTTV

SEQ ID NO: 3349 - protein, 12 aa, Semliki Forest virus
IRPSAPYKTTVV

SEQ ID NO: 3350 - protein, 12 aa, Semliki Forest virus
RPSAPYKTTVVG

SEQ ID NO: 3351 - protein, 12 aa, Semliki Forest virus
PSAPYKTTVVGV

SEQ ID NO: 3352 - protein, 13 aa, Semliki Forest virus
FAYEGLKIRPSAP

SEQ ID NO: 3353 - protein, 13 aa, Semliki Forest virus
AYEGLKIRPSAPY

SEQ ID NO: 3354 - protein, 13 aa, Semliki Forest virus
YEGLKIRPSAPYK

SEQ ID NO: 3355 - protein, 13 aa, Semliki Forest virus
EGLKIRPSAPYKT

SEQ ID NO: 3356 - protein, 13 aa, Semliki Forest virus
GLKIRPSAPYKTT

SEQ ID NO: 3357 - protein, 13 aa, Semliki Forest virus
LKIRPSAPYKTTV

SEQ ID NO: 3358 - protein, 13 aa, Semliki Forest virus
KIRPSAPYKTTVV

SEQ ID NO: 3359 - protein, 13 aa, Semliki Forest virus
IRPSAPYKTTVVG

SEQ ID NO: 3360 - protein, 13 aa, Semliki Forest virus
RPSAPYKTTVVGV

SEQ ID NO: 3361 - protein, 13 aa, Semliki Forest virus
PSAPYKTTVVGVF

SEQ ID NO: 3362 - protein, 14 aa, Semliki Forest virus
EFAYEGLKIRPSAP

SEQ ID NO: 3363 - protein, 14 aa, Semliki Forest virus
FAYEGLKIRPSAPY

SEQ ID NO: 3364 - protein, 14 aa, Semliki Forest virus
AYEGLKIRPSAPYK

SEQ ID NO: 3365 - protein, 14 aa, Semliki Forest virus
YEGLKIRPSAPYKT

SEQ ID NO: 3366 - protein, 14 aa, Semliki Forest virus
EGLKIRPSAPYKTT

SEQ ID NO: 3367 - protein, 14 aa, Semliki Forest virus
GLKIRPSAPYKTTV

SEQ ID NO: 3368 - protein, 14 aa, Semliki Forest virus
LKIRPSAPYKTTVV

SEQ ID NO: 3369 - protein, 14 aa, Semliki Forest virus
KIRPSAPYKTTVVG

SEQ ID NO: 3370 - protein, 14 aa, Semliki Forest virus
IRPSAPYKTTVVGV

SEQ ID NO: 3371 - protein, 14 aa, Semliki Forest virus
RPSAPYKTTVVGVF

SEQ ID NO: 3372 - protein, 14 aa, Semliki Forest virus
PSAPYKTTVVGVFG

SEQ ID NO: 3373 - protein, 15 aa, Semliki Forest virus
HEFAYEGLKIRPSAP

SEQ ID NO: 3374 - protein, 15 aa, Semliki Forest virus
EFAYEGLKIRPSAPY

SEQ ID NO: 3375 - protein, 15 aa, Semliki Forest virus
FAYEGLKIRPSAPYK

SEQ ID NO: 3376 - protein, 15 aa, Semliki Forest virus
AYEGLKIRPSAPYKT

SEQ ID NO: 3377 - protein, 15 aa, Semliki Forest virus
YEGLKIRPSAPYKTT

SEQ ID NO: 3378 - protein, 15 aa, Semliki Forest virus
EGLKIRPSAPYKTTV

SEQ ID NO: 3379 - protein, 15 aa, Semliki Forest virus
GLKIRPSAPYKTTVV

SEQ ID NO: 3380 - protein, 15 aa, Semliki Forest virus
LKIRPSAPYKTTVVG

SEQ ID NO: 3381 - protein, 15 aa, Semliki Forest virus
KIRPSAPYKTTVVGV

SEQ ID NO: 3382 - protein, 15 aa, Semliki Forest virus
IRPSAPYKTTVVGVF

SEQ ID NO: 3383 - protein, 15 aa, Semliki Forest virus
RPSAPYKTTVVGVFG

SEQ ID NO: 3384 - protein, 15 aa, Semliki Forest virus
PSAPYKTTVVGVFGV

SEQ ID NO: 3385 - protein, 16 aa, Semliki Forest virus
FHEFAYEGLKIRPSAP

SEQ ID NO: 3386 - protein, 16 aa, Semliki Forest virus
HEFAYEGLKIRPSAPY

SEQ ID NO: 3387 - protein, 16 aa, Semliki Forest virus
EFAYEGLKIRPSAPYK

SEQ ID NO: 3388 - protein, 16 aa, Semliki Forest virus
FAYEGLKIRPSAPYKT

SEQ ID NO: 3389 - protein, 16 aa, Semliki Forest virus
AYEGLKIRPSAPYKTT

SEQ ID NO: 3390 - protein, 16 aa, Semliki Forest virus
YEGLKIRPSAPYKTTV

SEQ ID NO: 3391 - protein, 16 aa, Semliki Forest virus
EGLKIRPSAPYKTTVV

SEQ ID NO: 3392 - protein, 16 aa, Semliki Forest virus
GLKIRPSAPYKTTVVG

SEQ ID NO: 3393 - protein, 16 aa, Semliki Forest virus
LKIRPSAPYKTTVVGV

SEQ ID NO: 3394 - protein, 16 aa, Semliki Forest virus
KIRPSAPYKTTVVGVF

SEQ ID NO: 3395 - protein, 16 aa, Semliki Forest virus
IRPSAPYKTTVVGVFG

SEQ ID NO: 3396 - protein, 16 aa, Semliki Forest virus
RPSAPYKTTVVGVFGV

SEQ ID NO: 3397 - protein, 16 aa, Semliki Forest virus
PSAPYKTTVVGVFGVP

SEQ ID NO: 3398 - protein, 17 aa, Semliki Forest virus
PFHEFAYEGLKIRPSAP

SEQ ID NO: 3399 - protein, 17 aa, Semliki Forest virus
FHEFAYEGLKIRPSAPY

SEQ ID NO: 3400 - protein, 17 aa, Semliki Forest virus
HEFAYEGLKIRPSAPYK

SEQ ID NO: 3401 - protein, 17 aa, Semliki Forest virus
EFAYEGLKIRPSAPYKT

SEQ ID NO: 3402 - protein, 17 aa, Semliki Forest virus
FAYEGLKIRPSAPYKTT

SEQ ID NO: 3403 - protein, 17 aa, Semliki Forest virus
AYEGLKIRPSAPYKTTV

SEQ ID NO: 3404 - protein, 17 aa, Semliki Forest virus
YEGLKIRPSAPYKTTVV

SEQ ID NO: 3405 - protein, 17 aa, Semliki Forest virus
EGLKIRPSAPYKTTVVG

SEQ ID NO: 3406 - protein, 17 aa, Semliki Forest virus
GLKIRPSAPYKTTVVGV

SEQ ID NO: 3407 - protein, 17 aa, Semliki Forest virus
LKIRPSAPYKTTVVGVF

SEQ ID NO: 3408 - protein, 17 aa, Semliki Forest virus
KIRPSAPYKTTVVGVFG

SEQ ID NO: 3409 - protein, 17 aa, Semliki Forest virus
IRPSAPYKTTVVGVFGV

SEQ ID NO: 3410 - protein, 17 aa, Semliki Forest virus
RPSAPYKTTVVGVFGVP

SEQ ID NO: 3411 - protein, 17 aa, Semliki Forest virus
PSAPYKTTVVGVFGVPG

SEQ ID NO: 3412 - protein, 18 aa, Semliki Forest virus
PPFHEFAYEGLKIRPSAP

SEQ ID NO: 3413 - protein, 18 aa, Semliki Forest virus
PFHEFAYEGLKIRPSAPY

SEQ ID NO: 3414 - protein, 18 aa, Semliki Forest virus
FHEFAYEGLKIRPSAPYK

SEQ ID NO: 3415 - protein, 18 aa, Semliki Forest virus
HEFAYEGLKIRPSAPYKT

SEQ ID NO: 3416 - protein, 18 aa, Semliki Forest virus
EFAYEGLKIRPSAPYKTT

SEQ ID NO: 3417 - protein, 18 aa, Semliki Forest virus
FAYEGLKIRPSAPYKTTV

SEQ ID NO: 3418 - protein, 18 aa, Semliki Forest virus
AYEGLKIRPSAPYKTTVV

SEQ ID NO: 3419 - protein, 18 aa, Semliki Forest virus
YEGLKIRPSAPYKTTVVG

SEQ ID NO: 3420 - protein, 18 aa, Semliki Forest virus
EGLKIRPSAPYKTTVVGV

SEQ ID NO: 3421 - protein, 18 aa, Semliki Forest virus
GLKIRPSAPYKTTVVGVF

SEQ ID NO: 3422 - protein, 18 aa, Semliki Forest virus
LKIRPSAPYKTTVVGVFG

SEQ ID NO: 3423 - protein, 18 aa, Semliki Forest virus
KIRPSAPYKTTVVGVFGV

SEQ ID NO: 3424 - protein, 18 aa, Semliki Forest virus
IRPSAPYKTTVVGVFGVP

SEQ ID NO: 3425 - protein, 18 aa, Semliki Forest virus
RPSAPYKTTVVGVFGVPG

SEQ ID NO: 3426 - protein, 18 aa, Semliki Forest virus
PSAPYKTTVVGVFGVPGS

SEQ ID NO: 3427 - protein, 19 aa, Semliki Forest virus
NPPFHEFAYEGLKIRPSAP

SEQ ID NO: 3428 - protein, 19 aa, Semliki Forest virus
PPFHEFAYEGLKIRPSAPY

SEQ ID NO: 3429 - protein, 19 aa, Semliki Forest virus
PFHEFAYEGLKIRPSAPYK

SEQ ID NO: 3430 - protein, 19 aa, Semliki Forest virus
FHEFAYEGLKIRPSAPYKT

SEQ ID NO: 3431 - protein, 19 aa, Semliki Forest virus
HEFAYEGLKIRPSAPYKTT

SEQ ID NO: 3432 - protein, 19 aa, Semliki Forest virus
EFAYEGLKIRPSAPYKTTV

SEQ ID NO: 3433 - protein, 19 aa, Semliki Forest virus
FAYEGLKIRPSAPYKTTVV

SEQ ID NO: 3434 - protein, 19 aa, Semliki Forest virus
AYEGLKIRPSAPYKTTVVG

SEQ ID NO: 3435 - protein, 19 aa, Semliki Forest virus
YEGLKIRPSAPYKTTVVGV

SEQ ID NO: 3436 - protein, 19 aa, Semliki Forest virus
EGLKIRPSAPYKTTVVGVF

SEQ ID NO: 3437 - protein, 19 aa, Semliki Forest virus
GLKIRPSAPYKTTVVGVFG

SEQ ID NO: 3438 - protein, 19 aa, Semliki Forest virus
LKIRPSAPYKTTVVGVFGV

SEQ ID NO: 3439 - protein, 19 aa, Semliki Forest virus
KIRPSAPYKTTVVGVFGVP

SEQ ID NO: 3440 - protein, 19 aa, Semliki Forest virus
IRPSAPYKTTVVGVFGVPG

SEQ ID NO: 3441 - protein, 19 aa, Semliki Forest virus
RPSAPYKTTVVGVFGVPGS

SEQ ID NO: 3442 - protein, 19 aa, Semliki Forest virus
PSAPYKTTVVGVFGVPGSG

SEQ ID NO: 3443 - protein, 20 aa, Semliki Forest virus
TNPPFHEFAYEGLKIRPSAP

SEQ ID NO: 3444 - protein, 20 aa, Semliki Forest virus
NPPFHEFAYEGLKIRPSAPY

SEQ ID NO: 3445 - protein, 20 aa, Semliki Forest virus
PPFHEFAYEGLKIRPSAPYK

SEQ ID NO: 3446 - protein, 20 aa, Semliki Forest virus
PFHEFAYEGLKIRPSAPYKT

SEQ ID NO: 3447 - protein, 20 aa, Semliki Forest virus
FHEFAYEGLKIRPSAPYKTT

SEQ ID NO: 3448 - protein, 20 aa, Semliki Forest virus
HEFAYEGLKIRPSAPYKTTV

SEQ ID NO: 3449 - protein, 20 aa, Semliki Forest virus
EFAYEGLKIRPSAPYKTTVV

SEQ ID NO: 3450 - protein, 20 aa, Semliki Forest virus
FAYEGLKIRPSAPYKTTVVG

SEQ ID NO: 3451 - protein, 20 aa, Semliki Forest virus
AYEGLKIRPSAPYKTTVVGV

SEQ ID NO: 3452 - protein, 20 aa, Semliki Forest virus
YEGLKIRPSAPYKTTVVGVF

SEQ ID NO: 3453 - protein, 20 aa, Semliki Forest virus
EGLKIRPSAPYKTTVVGVFG

SEQ ID NO: 3454 - protein, 20 aa, Semliki Forest virus
GLKIRPSAPYKTTVVGVFGV

SEQ ID NO: 3455 - protein, 20 aa, Semliki Forest virus
LKIRPSAPYKTTVVGVFGVP

SEQ ID NO: 3456 - protein, 20 aa, Semliki Forest virus
KIRPSAPYKTTVVGVFGVPG

SEQ ID NO: 3457 - protein, 20 aa, Semliki Forest virus
IRPSAPYKTTVVGVFGVPGS

SEQ ID NO: 3458 - protein, 20 aa, Semliki Forest virus
RPSAPYKTTVVGVFGVPGSG

SEQ ID NO: 3459 - protein, 20 aa, Semliki Forest virus
PSAPYKTTVVGVFGVPGSGK

SEQ ID NO: 3460 - protein, 326 aa, Ebola virus
MRRVILPTAPPEYMEAIYPVRSNSTIARGGNSNTGFLTPESVNGDTPSNPLRPIADDTIDHASHIPGSVSSAFILEAMVNVISGPKVLMKQIPIWLPLGVADQKTYSFDSTTAAIMLASYTITHFGKATNPLVRVNRLGPGIPDHPLRLLRIGNQAFLQEFVLPPVQLPQYFTFDLTALKLITQPLPAATWTDDTPTGSNGALRPGISFHPKLRPILLPNKSGKKGNSADLTSPEKIQAIMTSLQDFKIVPIDPTKNIMGIEVPETLVHKLTGKKVTSKNGQPIIPVLLPKYIGLDPVAPGDLTMVITQDCDTCHSPASLPAVIEK

SEQ ID NO: 3461 - protein, 400 aa, Hepatitis B virus
MGGWSSKPRKGMGTNLSVPNPLGFFPDHQLDPAFKANSDNPDWDLNPHKDNWPDSNKVGVGAFGPGFTPPHGGLLGWSPQAQGILTTVPTAPPPASTNRQLGRKPTPLSPPLRDTHPQAMQWNSTTFHQTLQDPRVRALYFPAGGSSSGTVNPVQNTASSISSILSTTGDPVPNMENIASGLLGPLLVLQAGFFSLTKILTIPQSLDSWWTSLNFLGGTPVCLGQNSQSQISSHSPTCCPPICPGYRWMCLRRFIIFLCILLLCLIFLLVLLDYQGMLPVCPLIPGSSTTSTGPCKTCTTPAQGTSMFPSCCCIKPTDGNCTCIPIPSSWAFAKYLWEWASVRFSWLSLLVPFVQWFVGLSPTVWLSVIWMMWFWGPSLYNILSPFMPLLPIFFCLWAYI

SEQ ID NO: 3462 - protein, 775 aa, human herpesvirus 1
MEPRPGASTRRPEGRPQREPAPDVWVFPCDRDLPDSSDSEAETEVGGRGDADHHDDDSASEADSTDTELFETGLLGPQGVDGGAVSGGSPPREEDPGSCGGAPPREDGGSDEGDVCAVCTDEIAPHLRCDTFPCMHRFCIPCMKTWMQLRNTCPLCNAKLVYLIVGVTPSGSFSTIPIVNDPQTRMEAEEAVRAGTAVDFIWTGNQRFAPRYLTLGGHTVRALSPTHPEPTTDEDDDDLDDADYVPPAPRRTPRAPPRRGAAAPPVTGGASHAAPQPAAARTAPPSAPIGPHGSSNTNTTTNSSGGGGSRQSRAAAPRGASGPSGGVGVGVGVVEAEAGRPRGRTGPLVNRPAPLANNRDPIVISDSPPASPHRPPAAPMPGSAPRPGPPASAAASGPARPRAAVAPCVRAPPPGPGPRAPAPGAEPAARPADARRVPQSHSSLAQAANQEQSLCRARATVARGSGGPGVEGGHGPSRGAAPSGAAPLPSAASVEQEAAVRPRKRRGSGQENPSPQSTRPPLAPAGAKRAATHPPSDSGPGGRGQGGPGTPLTSSAASASSSSASSSSAPTPAGAASSAAGAASSSASASSGGAVGALGGRQEETSLGPRAASGPRGPRKCARKTRHAETSGAVPAGGLTRYLPISGVSSVVALSPYVNKTITGDCLPILDMETGNIGAYVVLVDQTGNMATRLRAAVPGWSRRTLLPETAGNHVMPPEYPTAPASEWNSLWMTPVGNMLFDQGTLVGALDFRSLRSRHPWSGEQGASTRDEGKQ

SEQ ID NO: 3463 - protein, 338 aa, human herpesvirus 2
MLAVRSLQHLTTVIFITAYGLVLAWYIVFGASPLHRCIYAVRPAGAHNDTALVWMKINQTLLFLGPPTAPPGGAWTPHARVCYANIIEGRAVSLPAIPGAMSRRVMNVHEAVNCLEALWDTQMRLVVVGWFLYLAFVALHQRRCMFGVVSPAHSMVAPATYLLNYAGRIVSSVFLQYPYTKITRLLCELSVQRQTLVQLFEADPVTFLYHRPAIGVIVGCELLLRFVALGLIVGTALISRGACAITHPLFLTITTWCFVSIIALTELYFILRRGSAPKNAEPAAPRGRSKGWSGVCGRCCSIILSGIAVRLCYIAVVAGVVLVALRYEQEIQRRLFDL

SEQ ID NO: 3464 - protein, 372 aa, human herpesvirus 2
MPGRSLQGLAILGLWVCATGLVVRGPTVSLVSDSLVDAGAVGPQGFVEEDLRVFGELHFVGAQVPHTNYYDGIIELFHYPLGNHCPRVVHVVTLTACPRRPAVAFTLCRSTHHAHSPAYPTLELGLARQPLLRVRTATRDYAGLYVLRVWVGSATNASLFVLGVALSANGTFVYNGSDYGSCDPAQLPFSAPRLGPSSVYTPGASRPTPPRTTTSPSSPRDPTPAPGDTGTPAPASGERAPPNSTRSASESRHRLTVAQVIQIAIPASIIAFVFLGSCICFIHRCQRRYRRPRGQIYNPGGVSCAVNEAAMARLGAELRSHPNTPPKPRRRSSSSTTMPSLTSIAEESEPGPVVLLSVSPRPRSGPTAPQEV

SEQ ID NO: 3465 - protein, 487 aa, Human herpesvirus 4
MPTFYLALHGGQTYHLIVDTDSLGNPSLSVIPSNPYQEQLSDTPLIPLTIFVGENTGVPPPLPPPPPPPPPPPPPPPPPPPPPPPPPPSPPPPPPPPPPPQRRDAWTQEPSPLDRDPLGYDVGHGPLASAMRMLWMANYIVRQSRGDRGLILPQGPQTAPQARLVQPHVPPLRPTAPTILSPLSQPRLTPPQPLMMPPRPTPPTPLPPATLTVPPRPTRPTTLPPTPLLTVLQRPTELQPTPSPPRMHLPVLHVPDQSMHPLTHQSTPNDPDSPEPRSPTVFYNIPPMPLPPSQLPPPAAPAQPPPGVINDQQLHHLPSGPPWWPPICDPPQPSKTQGQSRGQSRGRGRGRGRGRGKGKSRDKQRKPGGPWRPEPNTSSPSMPELSPVLGLHQGQGAGDSPTPGPSNAAPVCRNSHTATPNVSPIHEPESHNSPEAPILFPDDWYPPSIDPADLDESWDYIFETTESPSSDEDYVEGPSKRPRPSIQ

SEQ ID NO: 3466 - protein, 412 aa, Influenza A virus
SKAGVTMEKLIVIAMLLASTNAYDRICIGYQSNNSTDTVNTLIEQNVPVTQTMELVETEKHPAYCNTDLGAPLELRDCKIEAVIYGNPKCDIHLKDQGWSYIVERPSAPEGMCYPGSIENLEELRFVFSSAASYKRIRLFDYSRWNVTRSGTSKACNASTGGQSFYRSINWLTKKKPDTYDFNEGTYVNNEDGDIIFLWGIHHPPDTKEQTTLYKNANTLTSVTTNTINRNFQPNIGPRPLVRGQQGRMDYYWGILKRGETLKIRTNGNLIAPEFGYLLKGESHGRIIQNEDIPIGNCNTKCQTYAGAINSSKPFQNASRHYMGECPKYVKKASLRLAVGLRNTPSVEPRGLFGAIAGFIEGGWSGMIDGWYGFHHSNSEGTGMAADQKSTQEAIDKITNKVNNIVDKMNRE

SEQ ID NO: 3467 - protein, 151 aa, Human papillomavirus
AQGHNNGICWFNELFVTVVDTTRSTNITISAAATQANEYTASNFKEYLRHTEEYDLQVILQLCKIHLTPEIMAYLHSMNEHLLDEWNFGVLPPPSTSLDDTYRYLQSRAITCQKGPSAPAPKKDPYDGLVFWEVDLKDKLSTDLDQFPLGR

SEQ ID NO: 3468 - protein, 519 aa, Human papillomavirus type 23
MVRAQRTKRASVTDIYKGCKASGTCPPDVLNKVEQNTLADKILKYGSVGVFFGGLGIGTGKGTGGATGYVPLRPGVRVGGTPTVVRPAVIPEIIGPTELIPVDSIAPIDPEAPSIVSLTDSGAAADLFPSEAETIAEVHPTPVDIGIDTPIVAGGRDAILEVVDTNPPTRFSVTRTQYDNPSFQIISESTPITGEASLADHVFVFEGSGGQHVGAVTEEIELDTYPSRYSFEIEEATPPRRTSTPIERISQEFRNLRRALYNRRLTEQVQVKNPLFLTTPSKLVRFQFDNPVFDEEVTQIFERDVAEVEEPPDRDFLDIDRLGRPLLTESTEGRIRLSRLGQRASIQTRSGTRVGSRVHFYTDLSTINTEEPIELELLGEHSGDASVIEEPLQSTVIDMNLDDVEAIQDTIDTADDYNSADLLLDNAIEEFNNSQLVFGTSDRSSSAYSIPRFESPRETIVYVQDIEGNQVIYPGPTERPTIIFPLPSAPAVVIHTLDKSFDYYLHPSLRKKRRKRKYL

SEQ ID NO: 3469 - protein, 502 aa, Human papillomavirus type 35
MSLWRSNEATVYLPPVSVSKVVSTDEYVTRTNIYYHAGSSRLLAVGHPYYAIKKQDSNKIAVPKVSGLQYRVFRVKLPDPNKFGFPDTSFYDPASQRLVWACTGVEVGRGQPLGVGISGHPLLNKLDDTENSNKYVGNSGTDNRECISMDYKQTQLCLIGCRPPIGEHWGKGTPCNANQVKAGECPPLELLNTVLQDGDMVDTGFGAMDFTTLQANKSDVPLDICSSICKYPDYLKMVSEPYGDMLFFYLRREQMFVRHLFNRAGTVGETVPADLYIKGTTGTLPSTSYFPTPSGSMVTSDAQIFNKPYWLQRAQGHNNGICWSNQLFVTVVDTTRSTNMSVCSAVSSSDSTYKNDNFKEYLRHGEEYDLQFIFQLCKITLTADVMTYIHSMNPSILEDWNFGLTPPPSGTLEDTYRYVTSQAVTCQKPSAPKPKDDPLKNYTFWEVDLKEKFSADLDQFPLGRKFLLQAGLKARPNFRLGKRAAPASTSKKSSTKRRKVKS

SEQ ID NO: 3470 - protein, 459 aa, Human papillomavirus type 6b
MAHSRARRRKRASATQLYQTCKLTGTCPPDVIPKVEHNTIADQILKWGSLGVFFGGLGIGTGSGTGGRTGYVPLQTSAKPSITSGPMARPPVVVEPVAPSDPSIVSLIEESAIINAGAPEIVPPAHGGFTITSSETTTPAILDVSVTSHTTTSIFRNPVFTEPSVTQPQPPVEANGHILISAPTVTSHPIEEIPLDTFVVSSSDSGPTSSTPVPGTAPRPRVGLYSRALHQVQVTDPAFLSTPQRLITYDNPVYEGEDVSVQFSHDSIHNAPDEAFMDIIRLHRPAIASRRGLVRYSRIGQRGSMHTRSGKHIGARIHYFYDISPIAQAAEEIEMHPLVAAQDDTFDIYAESFEPGINPTQHPVTNISDTYLTSTPNTVTQPWGNTTVPLSLPNDLFLQSGPDITFPTAPMGTPFSPVTPALPTGPVFITGSGFYLHPAWYFARKRRKRIPLFFSDVAA

SEQ ID NO: 3471 - protein, 533 aa, Human papillomavirus type 9
MVRAKRTKRASVTDIYRGCKAAGTCPPDVINKVEHTTIADKILQYGSAGVFFGGLGISTGRGTGGATGYVPLGEGPGVRVGGTPTIVRPGVIPEIIGPTDLIPLDTVRPIDPTAPSIVTGTDSTVDLLPGEIESIAEIHPVPVDNAVVDTPVVTEGRRGSSAILEVADPSPPMRTRVARTQYHNPAFQIISESTPMSGESSLADHIIVFEGSGGQLVGGPRESYTASSENIELQEFPSRYSFEIDEGTPPRTSTPVQRAVQSLSSLRRALYNRRLTEQVAVTDPLFLSRPSRLVQFQFDNPAFEDEVTQIFERDLSTVEEPPDRQFLDVQRLSRPLYTETPQGYVRVSRLGRRATIRTRSGAQVGAQVHFYRDLSTINTEEPIEMQLLGEHSGDSTIVQGPVESSIVDVNIDEPDGLEVGRQETPSVEDVDFNSEDLLLDEGVEDFSGSQLVVGTRRSTNTLTVPRFETPRDTSFYIQDIQGYTVSYPESRQTTDIIFPHPDTPTVVIHINDTSGDYYLHPSLQRKKRKRKYL

SEQ ID NO: 3472 - protein, 433 aa, Human T-cell lymphotropic virus type 2
MGQIHGLSPTPIPKAPRGLSTHHWLNFLQAAYRLQPGPSDFDFQQLRRFLKLALKTPIWLNPIDYSLLASLVPKGYPGRVVEIINILVKNQVSPSAPAAPVPTPICPTTTPPPPPPPSPEAHVPPPYVEPTSTKCFPILHPPGAPSAHRPWQMKDLQAIKQEVSSSAPGSPQFMQTLRLAVQQFDPTAKDLQDLLQYLCSSLVVSLHHQQLNTLITEAETRGVTGYNPMAGPLRMQANNPAQQGLRREYQNLWLAAFSTLPGNTRDPSWAAILQGLEEPYCAFVERLNVALDNGLPEGTPKEPILRSLAYSNANKECQKILQARGPTNSPLGEMLRACQAWTPKDKTKVLVVQPRRPPPTQPCFRCGKIGHWSRDCTQPRPPPGPCPLCQDPSHWKRDCPQPKPPQEEGEPLLLDLSSTSGTTEEKNSLRGEI

SEQ ID NO: 3473 - protein, 3430 aa, West Nile virus
MSKKPGGPGKNRAVNMLKRGMPRGLSLIGLKRAMLSLIDGKGPIRFVLALLAFFRFTAIAPTRAVLDRWRGVNKQTAMKHLLSFKKELGTLTSAINRRSTKQKKRGGTAGFTILLGLIACAGAVTLSNFQGKVMMTVNATDVTDVITIPTAAGKNLCIVRAMDVGYLCEDTITYECPVLAAGNDPEDIDCWCTKSSVYVRYGRCTKTRHSRRSRRSLTVQTHGESTLANKKGAWLDSTKATRYLVKTESWILRNPGYALVAAVIGWMLGSNTMQRVVFAILLLLVAPAYSFNCLGMSNRDFLEGVSGATWVDLVLEGDSCVTIMSKDKPTIDVKMMNMEAANLADVRSYCYLASVSDLSTRAACPTMGEAHNEKRADPAFVCKQGVVDRGWGNGCGLFGKGSIDTCAKFACTTKATGWIIQKENIKYEVAIFVHGPTTVESHGKIGATQAGRFSITPSAPSYTLKLGEYGEVTVDCEPRSGIDTSAYYVMSVGEKSFLVHREWFMDLNLPWSSAGSTTWRNRETLMEFEEPHATKQSVVALGSQEGALHQALAGAIPVEFSSNTVKLTSGHLKCRVKMEKLQLKGTTYGVCSKAFKFARTPADTGHGTVVLELQYTGTDGPCKVPISSVASLNDLTPVGRLVTVNPFVSVATANSKVLIELEPPFGDSYIVVGRGEQQINHHWHKSGSSIGKAFTTTLRGAQRLAALGDTAWDFGSVGGVFTSVGKAIHQVFGGAFRSLFGGMSWITQGLLGALLLWMGINARDRSIAMTFLAVGGVLLFLSVNVHADTGCAIDIGRQELRCGSGVFIHNDVEAWMDRYKFYPETPQGLAKIIQKAHAEGVCGLRSVSRLEHQMWEAIKDELNTLLKENGVDLSVVVEKQNGMYKAAPKRLAATTEKLEMGWKAWGKSIIFAPELANNTFVIDGPETEECPTANRAWNSMEVEDFGFGLTSTRMFLRIRETNTTECDSKIIGTAVKNNMAVHSDLSYWIESGLNDTWKLERAVLGEVKSCTWPETHTLWGDGVLESDLIIPITLAGPRSNHNRRPGYKTQNQGPWDEGRVEIDFDYCPGTTVTISDSCEHRGPAARTTTESGKLITDWCCRSCTLPPLRFQTENGCWYGMEIRPTRHDEKTLVQSRVNAYNADMIDPFQLGLMVVFLATQEVLRKRWTAKISIPAIMLALLVLVFGGITYTDVLRYVILVGAAFAEANSGGDVVHLALMATFKIQPVFLVASFLKARWTNQESILLMLAAAFFQMAYYDAKNVLSWEVPDVLNSLSVAWMILRAISFTNTSNVVVPLLALLTPGLKCLNLDVYRILLLMVGVGSLIKEKRSSAAKKKGACLICLALASTGVFNPMILAAGLMACDPNRKRGWPATEVMTAVGLMFAIVGGLAELDIDSMAIPMTIAGLMFAAFVISGKSTDMWIERTADITWESDAEITGSSERVDVRLDDDGNFQLMNDPGAPWKIWMLRMACLAISAYTPWAILPSVIGFWITLQYTKRGGVLWDTPSPKEYKKGDTTTGVYRIMTRGLLGSYQAGAGVMVEGVFHTLWHTTKGAALMSGEGRLDPYWGSVKEDRLCYGGPWKLQHKWNGHDEVQMIVVEPGKNVKNVQTKPGVFKTPEGEIGAVTLDYPTGTSGSPIVDKNGDVIGLYGNGVIMPNGSYISAIVQGERMEEPAPAGFEPEMLRKKQITVLDLHPGAGKTRKILPQIIKEAINKRLRTAVLAPTRVVAAEMSEALRGLPIRYQTSAVHREHSGNEIVDVMCHATLTHRLMSPHRVPNYNLFIMDEAHFTDPASIAARGYIATKVELGEAAAIFMTATPPGTSDPFPESNAPISDMQTEIPDRAWNTGYEWITEYVGKTVWFVPSVKMGNEIALCLQRAGKKVIQLNRKSYETEYPKCKNDDWDFVITTDISEMGANFKASRVIDSRKSVKPTIIEEGDGRVILGEPSAITAASAAQRRGRIGRNPSQVGDEYCYGGHTNEDDSNFAHWTEARIMLDNINMPNGLVAQLYQPEREKVYTMDGEYRLRGEERKNFLEFLRTADLPVWLAYKVAAAGISYHDRKWCFDGPRTNTILEDNNEVEVITKLGERKILRPRWADARVYSDHQALKSFKDFASGKRSQIGLVEVLGRMPEHFMVKTWEALDTMYVVATAEKGGRAHRMALEELPDALQTIVLIALLSVMSLGVFFLLMQRKGIGKIGLGGVILGAATFFCWMAEVPGTKIAGMLLLSLLLMIVLIPEPEKQRSQTDNQLAVFLICVLTLVGAVAANEMGWLDKTKNDIGSLLGHRPEARETTLGVESFLLDLRPATAWSLYAVTTAVLTPLLKHLITSDYINTSLTSINVQASALFTLARGFPFVDVGVSALLLAVGCWGQVTLTVTVTAAALLFCHYAYMVPGWQAEAMRSAQRRTAAGIMKNVVVDGIVATDVPELERTTPVMQKKVGQIILILVSMAAVVVNPSVRTVREAGILTTAAAVTLWENGASSVWNATTAIGLCHIMRGGWLSCLSIMWTLIKNMEKPGLKRGGAKGRTLGEVWKERLNHMTKEEFTRYRKEAITEVDRSAAKHARREGNITGGHPVSRGTAKLRWLVERRFLEPVGKVVDLGCGRGGWCYYMATQKRVQEVKGYTKGGPGHEEPQLVQSYGWNIVTMKSGVDVFYRPSEASDTLLCDIGESSSSAEVEEHRTVRVLEMVEDWLHRGPKEFCIKVLCPYMPKVIEKMETLQRRYGGGLIRNPLSRNSTHEMYWVSHASGNIVHSVNMTSQVLLGRMEKKTWKGPQFEEDVNLGSGTRAVGKPLLNSDTSKIKNRIERLKKEYSSTWHQDANHPYRTWNYHGSYEVKPTGSASSLVNGVVRLLSKPWDTITNVTTMAMTDTTPFGQQRVFKEKVDTKAPEPPEGVKYVLNETTNWLWAFLARDKKPRMCSREEFIGKVNSNAALGAMFEEQNQWKNAREAVEDPKFWEMVDEEREAHLRGECNTCIYNMMGKREKKPGEFGKAKGSRAIWFMWLGARFLEFEALGFLNEDHWLGRKNSGGGVEGLGLQKLGYILKEVGTKPGGKVYADDTAGWDTRITKADLENEAKVLELLDGEHRRLARSIIELTYRHKVVKVMRPAADGKTVMDVISREDQRGSGQVVTYALNTFTNLAVQLVRMMEGEGVIGPDDVEKLGKGKGPKVRTWLFENGEERLSRMAVSGDDCVVKPLDDRFATSLHFLNAMSKVRKDIQEWKPSTGWYDWQQVPFCSNHFTELIMKDGRTLVVPCRGQDELIGRARISPGAGWNVRDTACLAKSYAQMWLLLYFHRRDLRLMANAICSAVPANWVPTGRTTWSIHAKGEWMTTEDMLAVWNRVWIEENEWMEDKTPVERWSDVPYSGKREDIWCGSLIGTRTRATWAENIHVAINQVRSVIGEEKYVDYMSSLRRYEDTIVVEDTVL

SEQ ID NO: 3474 - protein, 325 aa, Measles virus
MHTPPPGAAEDSDPPGPPIGRAPGSPPPGAGRPTAKPEELPKEATEPDTVARRTAGPNEKPVLHNNTPPTLPTPRRKAPTTGSVPNANQVCNAANLTPLDTPQRLRAVYMSITRLSDNGYYTVPRRMLEFRSVNAVALNLLATLRTDKAIGPGKTTDNAEQPPEATFLVHIGNPRRKKSEVHSADHCKMKIEKMGPVSAPGGIGGTSLHIRSTGKTSKTLHAQLGLKKTPCYPPMDINEDLNRSLWRSRRKTARIQAAPQPSAPQEPRTHDDAITNDDQGPFKALQTAVTSNARKRPPSQRQPEGPDKKAPSEELHGPSERSASS

SEQ ID NO: 3475 - protein, 2116 aa, Rubella virus
MEKLLDEVLAPGGPYNLTVGSWVRDHVRSIVEGAWEVRDVVTAAQKRAIVAVIPRPVFTQMQVSDHPALHAISRYTRRHWIEWGPKEALHVLIDPSPGLLREVARVERRWVALCLHRTARKLATALAETASEAWHADYVCALRGAPSGPFYVHPEDVPHGGRAVADRCLLYYTPMQMCELMRTIDATLLVAVDLWPVALAAHVGDDWDDLGIAWHLDHDGGCPADCRGAGAGPTPGYTRPCTTRIYQVLPDTAHPGRLYRCGPRLWTRDCAVAELSWEVAQHCGHQARVRAVRCTLPIRHVRSLQPSARVRLPDLVHLAAVGRWRWFSLPRPVFQRMLSYCKTLSPDAYYSERVFKFKNALSHSITLAGNVLQEGWKGTCAEEDALCAYVAFRAWQSNARLAGIMKSAKRCAADSLSVAGWLDTIWDAIKRFFGSVPLAERMEEWEQDAAVAAFDRGPLEDGGRHLDTVQPPKSPPRPEIAATWIVHAASADRHCACAPRCDAPRERPSAPAGPPDDEALIPPWLFAERRALRCREWDFEALRARADTAAAPAPLAPRPARCPTVLYRHPAHHGPWLTLDEPGEADAALVLCDPLGQPLRGPERHFAAGAHMCAQARGLQAFVRVVPPPERPWADGGARAWAKFFRGCAWAQRLLGEPAVMHLPYTDGDVPQLIALALRTLAQQGAALALSVRDLPGGAAFDAHAVTAAVRAGPGQSAATSPPPGDPPPPRRARRSQRHLDARGTPPPAPARDPPPPAPSPPAPPRAGDPVLPTSAGPADRARHAELEVAYEPSDPPTPTKADPDSDIVESYARAAGPVHLRVRDIMDPPPGCKVVVNAANEGLLAGSGVCGAIFANATAALAADCRRLAPCPTGEAVATPGHGCGYTHIIHAVAPRRPRDPAALEEGEALLERAYRSIVALAAARRWACVACPLLGAGVYGWSAAESLRAALAATRAEPAERVSLHICHPDRATLTHASVLVGAGLAARRVSPPPTEPLASCPAGDPGRPAQRSASPPATPLGDATAPEPRGCQGCELCRYTRVTNDRAYVNLWLERDRGATSWAMRIPEVVVYGPEHLATHFPLNHYSVLKPAEVRPPRGMCGSDMWRCRGWQGMPQVRCTPSNAHAALCRTGVPPRVSTRGGELDPNTCWFRAAANVAQAARACGAYTSAGCPKCAYGRALSEARTHEDFAALSQRWSASHADASPDGTGDPLDPLMETVGCACSRVWVGSEHEAPPDHLLVSLHRAPNGPWGVVLEVRARPEGGNPTGHFVCAVGGGPRRVSDRPHLWLAVPLSRGGGTCAATDEGLAQAYYDDLEVRRLGDDAMARAALASVQRPRKGPYNIRVWNMAAGAGKTTRILAAFTREDLYVCPTNALLHEIQAKLRARDIDIKNAATYERALTKPLAAYRRIYIDEAFTLGGEYCAFVASQTTAEVICVGDRDQCGPHYANNCRTPVPDRWPTERSRHTWRFPDCWAARLRAGLDYDIEGERTGTFACNLWDGRQVDLHLAFSRETVRRLHEAGIRAYTVREAQGMSVGTACIHVGRDGTDVALALVRDLAIVSLTRASDALYLHELEDGSLRAAGLSAFLDAGALAELKEVPAGIDRVVAVEQAPPPLPPADGIPEAQDVPPFCPRTLEELVFGRAGHPHYADLNRVTEGEREVRYMRISRHLLNKNHTEMPGTERVLSAVCAVRRYRAGEDGSTLRTAVARQHPRPFRQIPPPRVTAGVAQEWRMTYLRERIDLTDVYTQMGVAARELTDRYARRYPEIFAGMCTAQSLSVPAFLKATLKCVDAALGPRDTEDCHAAQGKAGLEIRAWAKEWVQVMSPHFRAIQKIIMRALRPQFLVAAGHTEPEVDAWWQAHYTTNAIEVDFTEFDMNQTLATRDVELEISAALLGLPCAEDYRALRAGSYCTLRELGSTETGCERTSGEPATLLHNTTVAMCMAMRMVPKGVRWAGIFQGDDMVIFLPEGARSAALKWTPAEVGLFGFHIPVKHVSTPTPSFCGHVGTAAGLFHDVMHQAIKVLCRRFDPDVLEEQQVALLDRLRGVYAALPDTVAANAAYYDYSAERVLAIVRELTAYARGRGLDHPATIGALEEIQTPYARANLHDAD

SEQ ID NO: 3476 - protein, 177 aa, Colorado tick fever virus
GAFVLALLISLQSVYFKLYEFYKNNETARNTSVAGFLKRHEVAVNVIVEFSFDILFFLCGLLGFELSPTARRLIFRRTASAEKADTVELEHVSSRRRNDSRDDSTVRNVSKTSPLASQRSRDHFDGDPREPAPPAYSPADFYPPPASPHICETPLSTRVAPSAPSASLFTAGGIGLP

SEQ ID NO: 3477 - protein, 648 aa, Human foamy virus
MASGSNVEEYELDVEALVVILRDRNIPRNPLHGEVIGLRLTEGWWGQIERFQMVRLILQDDDNEPLQRPRYEVIQRAVNPHTMFMISGPLAELQLAFQDLDLPEGPLRFGPLANGHYVQGDPYSSSYRPVTMAETAQMTRDELEDVLNTQSEIEIQMINLLELYEVETRALRRQLAERSSTGQGGISPGAPRSRPPVSSFSGLPSLPSIPGIHPRAPSPPRATSTPGNIPWSLGDDSPPSSSFPGPSQPRVSFHPGNPFVEEEGHRPRSQSRERRREILPAPVPSAPPMIQYIPVPPPPPIGTVIPIQHIRSVTGEPPRNPREIPIWLGRNAPAIDGVFPVTTPDLRCRIINAILGGNIGLSLTPGDCLTWDSAVATLFIRTHGTFPMHQLGNVIKGIVDQEGVATAYTLGMMLSGQNYQLVSGIIRGYLPGQAVVTALQQRLDQEIDDQTRAETFIQHLNAVYEILGLNARGQSIRASVTPQPRPSRGRGRGQNTSRPSQGPANSGRGRQRPASGQSNRGSSTQNQNQDNLNQGGYNLRPRTYQPQRYGGGRGRRWNDNTNNQESRPSDQGSQTPRPNQAGSGVRGNQSQTPRPAAGRGGRGNHNRNQRSSGAGDSRAVNTVTQSATSSTDESSSAVTAASGGDQRD

SEQ ID NO: 3478 - protein, 123 aa, Hepatitis E virus
MNNMSFAAPMGSRPCALGLFCCCSSCFCLCCPRHRPVSRLAAVVGGAAAVPAVVSGVTGLILSPSQSPIFIQPTPSPPMSPLRPGLDLVFANLPDHSAPLGVTRPSAPPLPHVVDLPQLGPRR

SEQ ID NO: 3479 - protein, 2842 aa, Hepatitis G virus
MAVLLLLLVVEAGAILAPATHVCRASGQYFLTNCCALENIGFCLEGGCLVPLGCTVCTDRCWPLYQAGLAVRPGKSAAQLVGELGSLYGPLSVSAYVAGILGLGEVYSGVLTVGVALTRRAYPVPNLTCSVECELKWESEFWRWTEQLASNYWILEYLWKVPFDFWRGVMSLTPLLVCVAALLLLEQRIVMVFLLVTMAGMSQGAPASVLGSRPFEAGLTWQSCSCEANGSRVPTGERVWDRGNVTLLCDCPNGPWVWLPAVCQAIGWGDPITHWSHGQNQWPLSCPQFVYGAVSVTCVWGSVSWFASTGGRDSKIDVWSLVPVGSASCTIAALGSSDRDTVVELSEWGIPCATCILDRRPASCGTCVRDCWPETGSVRFPFHRCGAGPRLTKDLEAVPFVNRTTPFTIRGPLGNQGKGNPVRSPLGFGSYTMTKIRDSLHLVKCPTPAIEPPTGTFGFFPGTPPLNNCMLLGTEVSEVLGGAGLTGGFYEPLVRRCSELAGRRNPVCPGFAWLSSGRPDGFIHVQGHLQEVGAGNFIPPPRWLLLDFVFVLLYLVKLAEARLVPLILLLLWWWVNQLAVLGLPTAHAAVAGEVFAGPALSWCLGLPFVSMILGLANLVLYFRWMGPQRLMFLVLWKLARGAFPLALLMGIPATRGRTSVLGAEFCFDVTFEVDTSVLGWVVASVVAWAIALLSSMSAGGWRHKAVIYRTWCKGYQALRQRVVRSPLGEGRPTKPLTFAWCLASYIWPDAVMLVVVGLVLLFGLFDALDWALEELLVSRPSLRRLARVVECCVMAGEKATTIRLVSKMCARGAYLFDHMGSLSRAVKERLPEWDAALEPLSFTRTDCRIIRDAARTLSCGQCVMGLPVVARRGDEVLIGVFQDVNHLPPGFVPTAPVVIRRCGKGFLGVTKAALTGRDPDLHPGNVMVLGTATSRSMGTCLNGLLFTTFHGASSRTIATPVGALNPRWWSASDDVTVYPLPDGANSLTPCTCQAESCWVIRSDGALCHGLSKGDKVELDVAMEVSDFRGSSGSPVLCDEGHAVGMLVSVLHSGGRVTAARFIRPWTQVPTDAKTTTEPPPVPAKGVFKEAPLFMPTGAGKSTRVPLEYGNMGHKVLILNPSVATVRAMGPYMERLAGRHPSIYCGHDTTAFTRITDSPLTYSTYGRFLANPRQMLRGVSVVICDECHSHDSTVLLGIGRVRELARGCGVQLVLYATATPPGSPMVQHPSIIETKLDVGEIPFYGHGISLERMRTGRHLVFCHSKAECERLAGQFSSRGVNAIAYYRGKDSSIIKDGDLVVCATDALSTGYTGNFDSVTDCGLVVEEVVEVTLDPTITISLRTVPASAELSMQRRSRTGRGRSGRYYYAGVGKAPAGVVRSGPVWSAVEAGMTWYGMEPDLTANLLRLYDDCPYTAAIAADIGEAAVFFAGLAPLRMHPDVSWAKVRGVNWPLLVGVQRTMCRETLSPGPSDDPQWAGLKGPNPVPLLLRWGNDLPSKVAGHHIVDDLVRRLGVAEGYVRCDAGPILMVGLAIAGGMIYASYTGSLVVVTDWDVKGGGNPLYRNGDQATPQPVVQVPPVDHRPGGESAPSDAKTVTDAVAAIQVNCDWSVMTLSIGEVLALAQAKTAEAYTATAKWLAGCYTGTRAVPTVSIVDKLFAGGWAAVVGHCHSVIAAAVAAYGASRSPPLAAAASYLMGLGDGGNAQARLASALLLGAAGTALGTPVVGLTMAGAFMGGASVSPSLVTVLLGAVGGWEGVVNAASLVFDFMAGKLSTDDLWYAIPVLTSPGAGLAGIALGLVLYSANNSGTTTWLNRLLTTLPRSSCIPDSYFQQADYCDKVSAMLRRLSLTRTVVALVNREPRVDEVQVGYVWDLWEWIMRQVRMVIARVRALCPVVSLPLWHCGEGWSGEWLLDGHVESRCLCGCVITGDVFNGQLKDPVYSTKLCRHYWMGTVPVNMLGYGETSLLLASDTPKVVPFGTSGWAEVVVTPTHVVIRRTSCYKLLRQQILSAAVAEPYYVDGIPVSWEADARAPAMVYGPGQSATIDGERYTLPHQLRMRNVAPSEVPSEVSIEIGTETEDSELTEADLPPAAAALQAIENAARILEPHIDVIMEDCSTPSLCGSSREMPVWGEDVPRTPSPALISVTESSSDEKTPSASSSQEDTPSSDSFEVIQESDTAESEDSVFNVALSVPKALFPQSDATRKLTVRMSCCVEKSVTRFFSLGLTVADVASLCEMEIQNHTAYCDKVRTPLELQVGCLVGNELTFECDKCEARQETLASFSYIWSGVPLTRATPAKPPVVRPVGSLLVADTTKVYVTNPHNVGRRVDNVTFWRAPRVHDKFLVDSIERARRAAQACLSMGYTYEEAIRTVRPHAAMGWGSKVSVKDLATPAGKMSVHDRFQEIAEGTPVPFTLTVKKEVFFKDRKEEKAPRFIVFPPLNFRIAAKLILGDPARVPKAVLGGAYAFQYTPNQRVKEMLKLWESKKTPCAICVDATCFDSSITEEDVALETELYALASDHPEWVRALGKYYASGTMVTPEGVPVGERYCRSSGVLTTSASNCLTCYIKVKAACDRVGLKNVSFLIAGDDCLIICERPMCDPSEALGRALASYGYACEPSYHASLDAAPFCSTWLAECNADGKRHFFLTTDFRRPLARMSSEYSDPMASAIGYILLYPWHPITRWVIIPHVLTCAFRGGGTPSDPVWCQVHGNYYKFPLDKLPNIIVALHGPAALRVTADTTKTKMEAGKVLSDLKLPGLAVHRKKAGALRTRMLRSHDWAELARGLLWHPGLRLPPPEIAGIPGGFPLSPPYMGVVHQLDFTAQRSRWWWLGFLTLLIVALFG

SEQ ID NO: 3480 - protein, 1046 aa, Human herpesvirus 5
MSLQFIGLQRRDVVALVNFLRHLTQKPDVDLEAHPKILKKCGEKRLHRRTVLFNELMLWLGYYRELRFHNPDLSSVLEEFEVRCAAVARRGYTYPFGDRGKARDHLAVLDRTEFDTDVRHDAEIVERALVSAVILAKMSVRETLVTAIGQTEPIAFVHLKDTEVQRIEENLEGVRRNMFCVKPLDLNLDRHANTALVNAVNKLVYTGRLIMNVRRSWEELERKCLARIQERCKLLVKELRMCLSFDSNYCRNILKHAVENGDSADTLLELLIEDFDIYVDSFPQSAHTFLGARPPSLEFDDDANLLSLGGGSAFSSVPKKHVPTQPLDGWSWIASPWKGHKPFRFEAHGSLAPAADAHAARSAAVGYYDEEEKRRERQKRVDDEVVQREKQQLKAWEERQQNLQQRQQQPPPPTRKPGASRRLFGSSADEDDDDDDDEKNIFTPIKKPGTSGKGAASGNGVSSIFSGMLSSGSQKPTSGPLNIPQQQQRHAAFSLVSPQVTKASPGRVRRDSAWDVRPLTETRGDLFSGDEDSDSSDGYPPNRQDPRFTDTPVDITDTETSAKPPVTTAYKFEQPTLTFGAGVNVPAGAGAAILTPTPVNPSTAPAPAPTPTFAGTQTPVNGNSPWAPTAPLPGDMNPANWPRERAWALKNPHLAYNPFRMPTTSTTSQNNVSTTPRRPSTPRAAVTQTASQNAADEVWALRDQTAESPVEDSEEEDDDSSDTGSVVSLGHTTPSSDYNDVISPPSQTPEQSTPSRIRKAKLSSPMTTTSTSQKPVLGKRVATPHASARAQTVTSTPVQGRVEKQVSGTPSTVPATLLQPQPASSKTTSSRNVTSGARTSSASARQPSASASVLSPTEDDVVSPVTSPLSMLSSASPSPAKSAPPSPVKGRGSRVGVPSLKPTLGGKAVVGRPPSVPVSGSAPGRLSGTSRAASTTPTYPAVTTVYPPSSTAKSSVSNAPPVASPSILKPGASAALQSRRSTGTAAVGSPVKSTTGMKTVAFDLSSPQKSGTGPQPGSAGMGGAKTPSDAVQNILQKIEKIKNTEE

SEQ ID NO: 3481 - protein, 2179 aa, Human parechovirus 2
METIKSIADMATGVTKTIDATINSVNEIITNTDNASGGDILTKVADDASNILGPNCYATTSEPENKDVVQATTTVNTTNLTQHPSAPTLPFTPDFSNVDTFHSMAYDTTTGSKNPNKLVRLTTHAWASTLQRGHQIDHVNLPVDFWDEQRKPAYGHAKYFAAVRCGFHFQVQVNVNQGTAGSALVVYEPKPVVDYDKDLEFGAFTNLPHVLMNLAETTQADLCIPYVADTNYVKTDSSDLGQLKVYVWTPLSIPSGSSNQVDVTILGSLLQLDFQNPRVYGQNVDIYDTAPSKPIPLRKTKYLTMSTKYKWTRNKVDIAEGPGSMNMANVLSTTAAQSVALVGERAFYDPRTAGSKSRFDDLVKISQLFSVMADSTTPSANHGIDQKGYFKWSANSDPQAIVHRNLVHLNLFPNLKVFENSYSYFRGSLIIRLSVYASTFNRGRLNGFFPNSSTDETSEIDNAIYTICDIGSDNSFEITIPYSFSTWMRKTHGKPIGLFQIEVLNRLTYNYSSPNEVYCIVQGKMGQDAKFFCPTGSLVTFQNSWGSQMDLTDPLCIEDSVEDCKQTITPTELGLTSAQDDGPLGNDKPNYFLNFKSMNVDIFTVSHTKVDNIFGRAWFAHVHDFTNDGLWRQGLEFPKEGHGALSLLFAYFTGELNIHVLFLSDRGFLRVGHTYDTETNRTNFLSSSGIITVPAGEQMTLSVPSYSNKPLRTVRSSNALGYLLCKPLLTGTSSGRIEIFLSLRCPNFFFPLPAPKPATRKYRGDLATWSDQSPYGRQGKKQLMKLAYLDRGFYKHYGIVVGDDVYQLDSDDIFKTALTGKAKFTKTRLTPDWVVEEECELDYFRIKYLESSVNSEHIFSVDNNCETIAKDIFGSHSLSQHQQIGLIGTILLTAGLMSTIKTPVNPTTIKEFFNHAIEGDEQGLSLLVQKCTTFFSSAATELLDNDLVKFIIKILVRILCYMVLYCHKPNILTTACLSTLLVMDVTSSSVLSPSCKALMQCLMDGDVKKLAEVVAESMSNTDDDEIKEQICDTVKYTKQILSNQGPFKGFNEISTAFRHIDWWIQTLLKIKDMVLSVFKPSVEKRAVEWLERNKEHVCSILDYASDIIVKSKDQTKMKTQEFYQRYNDCLSKFKPIMAMCFRSCHNSISNTVYRLFQELARIPNRMATQNDLIRVEPIGIWIQGEPGQGKSFLTHTLSKQLQKTCGLQGIYTNPTASEFMDGYDNQDIHLIDDLGQTRKERDIEMLCNCISSDPDIVPMAHLEEKGKFYTSKLVIATTNKPDFSSTVLLDSGALRRRFPYIMHIRAAKHYSKSGKLNVSQAMPHMSTGECWEVSKNGRDWETLKLKELIDKITVDYKERIANYNTWKKQLEDQTLDDLDDAVSYIKHNYPDAIPYIDEYLNIEMSTLIEQMEAFIEPKPSVFKCFASRVGDKIKEASREVVKWFSDKLKSMLNFVERNKAWLTVVSAVTSAIGILLLVTKIFKKEESKDERAYNPTLPVAKPKGTFPVSQREFKNEAPYDGQLEHIISQMAYITGSTTGHITHCAGYQHDEIILHGHSIKYLEQEEELTLHYKNKVFPIEQPSVTQVTLGGKPMDLAIVKCKLPFRFKKNSKYYTNKIGTESMLIWMTEQGIITKEVQRVHHSGGIKTREGTESTKTISYTVKSCKGMCGGLLISKVEGNFKILGMHIAGNGEMGVAIPFNFLKNDMSDQGIVTEVTPIQPMYINTKSQIHKSPVYGAVEVKMGPAVLSKSDTRLEEPVDCLVKKSASKYRVNKFQVNNELWQGVKACVKSKFREIFGVNGIVDMKTAILGTSHVNSMDLSTSAGYSFVKSGYKKKDLICLEPFSVSPMLEKLVQEKFHNLLKGNQITTIFNTCLKDELRKLDKIATGKTRCIEACEIDYCIVYRMIMMEIYDKIYQTPCYYSGLAVGINPYRDWHFMINALNDYNYEMDYSQYDGSLSSMLLWEAVQVLAYCHDSPDLVMQLHKPVIDSDHVVFNERWLIHGGMPSGSPCTTVLNSLCNLMMCIYTTNLISPGIDCLPIVYGDDVILSLDKEIEPERLQSIMAESFGAEVTGSRKDEPPSLKPRMEVEFLKRKPGYFPESTFIVGKLDTENMIQHLMWMKNFSTFKQQLQSYLMELCLHGKDTYQHYVKILNPYLKEWNIPVDDYEVVIGKLVPMVFD

SEQ ID NO: 3482 - protein, 1336 aa, Semliki Forest virus
MAAKVHVDIEADSPFIKSLQKAFPSFEVESLQVTPNDHANARAFSHLATKLIEQETDKDTLILDIGSAPSRRMMSTHKYHCVCPMRSAEDPERLVCYAKKLAAASGKVLDREIAGKITDLQTVMATPDAESPTFCLHTDVTCRTAAEVAVYQDVYAVHAPTSLYHQAMKGVRTAYWIGFDTTPFMFDALAGAYPTYATNWADEQVLQARNIGLCAASLTEGRLGKLSILRKKQLKPSDTVMFSVGSTLYTESRKLLRSWHLPSVFHLKGKQSFTCRCDTIVSCEGYVVKKITMCPGLYGKTVGYAVTHHAEGFLVCKTTDTVKGERVSFPVCTYVPSTICDQMTGILATDVTPEDAQKLLVGLNQRIVVNGRTQRNTNTMKNYLLPVVAVAFSKWAREYKADLDDEKPLGVRERSLTCCCLWAFKTKKMHTMYKKPDTQTIVKVPSEFNSFVIPSLWSTGLAIPVRSRIKMLLAKKTKRELIPALDASSARDAEQEEKERLEAELTREALPPLVPIAPAETGVVDVDVEELEYRAGAGVVETPRSALKVTAQPNDVLLGNYVVLSPQTVLKSSKLAPVHPLAEQVKIITHNGRAGRYQVDGYDGRVLLPCGSAIPVPEFQALSESATMVYNEREFVNRKLYHIAVHGPSLNTDEENYEKVRAERTDAEYVFDVDKKCCIKREEASGLVLVGELTNPPFHEFAYEGLKIRPSAPYKTTVVGVFGVPGSGKSAIIKSLVTKHDLVTSGKKENCQEIVNDVKKHRGLDIQAKTVDSILLNGCRRAVDILYVDEAFACHSGTLLALIALVKPRSKVVLCGDPKQCGFFNMMQLKVNFNHNICTEVCHKSISRRCTRPVTAIVSTLHYGGKMRTTNPCNKPIIIDTTGQTKPKPGDIVLTCFRGWVKQLQLDYRGHEVMTAAASQGLTRKGVYAVRQKVNENPLYAPASEHVNVLLTRTEDRLVWKTLAGDPWIKVLSNIPQGNFTATLEEWQEEHDKIMKVIEGPAAPVDAFQNKANVCWAKSLVPVLDTAGIRLTAEEWSTIITAFKEDRAYSPEVALNEICTKYYGVDLDSGLFSAPKVSLYYENNHWDNRPGGRMYGFNAATAARLEARHTFLKGQWHTGKQAVIAERKIQPLSVLDNVIPINRRLPHALVAEYKTVKGSRVEWLVNKVRGYHVLLVSEYNLALPRRRVTWLSPLNVTGADRCYDLSLGLPADAGRYDLVFVNIHTEFRIHHYQQCVDHAMKLQMLGGDALRLLKPGGNLLMRAYGYADKISEAVVSSLSRKFSSARVLRPDCVTSNTEVFLLFSNFDNGKRPSTLHQMNTKLSAVYAGEAMHTAGC

SEQ ID NO: 3483 - protein, 500 aa, Human immunodeficiency virus
MGARASVLSGGELDKWEKIRLRPGGKKQYKLKHIVWASRELERFAVNPGLLETSEGCRQILGQLQPSLQTGSEELRSLYNTIAVLYCVHQRIDVKDTKEALDKIEEEQNKSKKKAQQAAADTGNNSQVSQNYPIVQNLQGQMVHQAISPRTLNAWVKVVEEKAFSPEVIPMFSALSEGATPQDLNTMLNTVGGHQAAMQMLKETINEEAAEWDRLHPVHAGPIAPGQMREPRGSDIAGTTSTLQEQIGWMTHNPPIPVGEIYKRWIILGLNKIVRMYSPTSILDIRQGPKEPFRDYVDRFYKTLRAEQASQEVKNWMTETLLVQNANPDCKTILKALGPGATLEEMMTACQGVGGPGHKARVLAEAMSQVTNPATIMIQKGNFRNQRKTVKCFNCGKEGHIAKNCRAPRKKGCWKCGKEGHQMKDCTERQANFLGKIWPSHKGRPGNFLQSRPEPTAPPEESFRFGEETTTPSQKQEPIDKELYPLASLRSLFGSDPSSQ

SEQ ID NO: 3484 - DNA, 157 bp, Human immunodeficiency virus
cttcagagcagaccagagccaacagccccaccagaagagagcttcaggtttggggaagagacaacaactccctctcagaagcaggagccgatagacaaggaactgtatcctttagcttccctcagatcactctttggcagcgacccctcgtcacaat

SEQ ID NO: 3485 - protein, 17 aa, Artificial
  Modified HIV peptide
RRRRRRRRRPEPTAPEE

SEQ ID NO: 3486 - protein, 17 aa, Artificial
  Modified HIV peptide
RRRRRRRRRPEPTALEE

SEQ ID NO: 3487 - protein, 7 aa, Artificial
  Modified HIV peptide
  MOD_RES (7)..(7): AMIDATION
RPEPTAP

What is claimed is:

1. A composition comprising a peptide associated with a transporter that is capable of increasing the uptake of said peptide by a mammalian cell,
wherein said peptide includes an amino acid sequence motif PX₁X₂P and is capable of binding the UEV domain of Tsg101,
wherein X₁ and X₂ are amino acids, and X₂ is not arginine, and
wherein said peptide does not contain a contiguous amino acid sequence of an HIV GAG protein that is sufficient to impart an ability to bind the UEV domain of Tsg101 on said peptide.

2. The composition according to claim 1, wherein said peptide does not contain a contiguous amino acid sequence of 10 or more residues of an HIV GAG protein that encompasses the late domain motif of said GAG protein.

3. The composition of claim 1, wherein said peptide is covalently linked to said transporter.

4. The composition of claim 1, wherein the transporter is capable of increasing the uptake of said peptide by said mammalian cell by at least 100%.

5. The composition according to claim 1, wherein said transporter is capable of increasing the uptake of said peptide by said mammalian cell by at least 300%.

6. The composition according to claim 1, wherein X₁ is threonine (T) or serine (S), and X₂ is alanine (A).

7. The composition according to claim 1, wherein said peptide consists of from 8 to about 50 amino acids.

8. An isolated nucleic acid encoding a hybrid polypeptide hybrid polypeptide, said hybrid polypeptide consists of a peptide covalently linked to a peptidic transporter that is capable of increasing the uptake of said peptide by a mammalian cell by at least 100%,
wherein said peptide consists of from about 8 to about 100 amino acid residues, comprises an amino acid sequence motif PX₁X₂P, and is capable of binding the UEV domain of Tsg101, wherein X₁ and X₂ are amino acids, and X₂ is not R, and
wherein said peptide does not contain a contiguous amino acid sequence of an HIV GAG protein that is sufficient to impart an ability to bind the UEV domain of Tsg101 on said peptide.

9. A host cell comprising the isolated nucleic acid according to claim 8.

10. An isolated peptide consisting of a contiguous amino acid sequence of from 8 to about 30 amino acid residues of a viral protein selected from the group consisting of HBV PreS1/PreS2/S envelope protein, HSV1 RL2 protein, HSV2 virion glycoprotein K, HSV2 Strain 333 glycoprotein I, EBV nuclear protein EBNA2, Influenza A virus hemagglutinin, HPV L1 proteins, HPV L2 proteins, HPV late proteins, HTLV-2 GAG protein, West Nile virus polyprotein precursor, Measles virus matrix protein, Rubella virus non-structural protein, Colorado tick fever virus VP12, foot-and-mouth disease virus VP1 capsid protein, human foamy virus GAG protein, hepatitis G virus polyprotein precursor, human parechovirus 2 polyprotein, and Semliki forest virus polyprotein,
wherein said contiguous amino acid sequence encompasses the P(T/S)AP motif of said viral protein,
wherein said peptide is capable of binding the UEV domain of Tsg101,
and wherein said peptide does not contain a contiguous amino acid sequence of an HIV GAG protein or Ebola virus Matrix (EbVp40) protein that is sufficient to impart an ability to bind the UEV domain of Tsg101 on said peptide.

11. An isolated nucleic acid encoding the isolated peptide according to claim 10.

12. A method for inhibiting HIV budding from cells, comprising administering to cells the composition of claim 1.

13. A method for inhibiting HIV budding from cells, comprising administering to cells the peptide of claim 10.

14. A method for inhibiting HIV budding from cells, comprising introducing into cells infected with HIV the peptide consisting of from 8 to about 30 amino acid residues and having an amino acid sequence motif PX₁X₂P, wherein X₁ and X₂ are amino acids, and X₂ is not R,
wherein said peptide is capable of binding the UEV domain of Tsg101, and
wherein said peptide does not contain a contiguous amino acid sequence of an HIV GAG protein that is sufficient to impart an ability to bind the UEV domain of Tsg101 on said peptide.
